(19) United States
(12) Patent Application Publication
(10) Pub. No.: US 2006/0195934 A1
(43) Pub. Date: Aug. 31, 2006

(54) Modulating plant alkaloids

(76) Inventors: Nestor Apuya, Culver City, CA (US); Steven Craig Bobzin, Malibu, CA (US); Joon-Hyun Park, Oak Park, CA (US)

Correspondence Address: FISH & RICHARDSON P.C., PO BOX 1022, MINNEAPOLIS, MN, 55440-1022, US

(21) Appl. No.: 11/360,459

(22) Filed: Feb. 22, 2006

Related U.S. Application Data
(60) Provisional application No. 60/654,927, filed on Feb. 22, 2005.

(51) Int. Cl. A01H 1/00

(52) U.S. Cl. 800/278; 800/295

(57) ABSTRACT

Materials and methods are provided for identifying regulatory region-regulatory protein associations and modulating expression of a sequence of interest. For example, a plant cell is provided containing a regulatory protein that can modulate expression of one or more genes involved in alkaloid biosynthesis in plants, which, in turn, can modulate the amount and/or rate of biosynthesis of one or more alkaloid compounds.

### CROSS-REFERENCE TO RELATED APPLICATIONS

[0001] This application claims priority under 35 U.S.C. § 119 to U.S. Provisional Application No. 60/654,927, filed Feb. 22, 2005, which is incorporated herein by reference in its entirety.

### TECHNICAL FIELD

[0002] This document relates to materials and methods involved in modulating the rate of production and accumulation of alkaloid compounds, e.g., alkaloid secondary metabolites, in plants. For example, this document provides plants having increased alkaloid levels as well as materials and methods for making plants having increased alkaloid levels.

### INCORPORATION-BY-REFERENCE & TEXTS

[0003] The material on the accompanying diskette is hereby incorporated by reference into this application. The accompanying compact discs contain one file, 11696-157001.txt, which was created on Feb. 22, 2006. The file named 11696-157001.txt is 688 KB. The file can be accessed using Microsoft Word on a computer that uses Windows OS.

### BACKGROUND

[0004] Regulation of gene expression is achieved by the direct or indirect interaction of regulatory proteins such as transcription factors with cis-acting DNA regulatory regions, including promoters, promoter elements, and promoter motifs, which may be located upstream, downstream, and/or within a gene of interest. Certain regulatory proteins can interact with regulatory regions for a number of genes, often driving the coordinate expression of multiple genes in a pathway. For example, binding of a transcription factor to a promoter or promoter element usually results in a modulation, e.g., an increase, of basal rates of transcription initiation and/or elongation. Promoters typically have a modular organization that includes multiple cis-elements (promoter elements), which can interact in additive or synergistic manners to modulate transcription. Identification of regulatory proteins that bind to particular DNA regulatory regions can provide tools to facilitate the selective expression of proteins of interest, e.g., to modify plant biosynthetic pathways.

[0005] Plant families that produce alkaloids include the Papaveraceae, Berberidaceae, Leguminosae, Boraginaceae, Apocynaceae, Asclepiadaceae, Liliaceae, Gnetaceae, Erythroxylaceae, Convolvulaceae, Ranunculaeceae, Rubiaceae, Solanaceae, and Rutaceae families. Many alkaloids isolated from such plants are known for their pharmacologic (e.g., narcotic), insecticidal, and physiologic effects. For example, the poppy (Papaveraceae) family contains about 250 species found mainly in the northern temperate regions of the world. The principal morphinan alkaloids in opium poppy (Papaver somniferum) are morphine, codeine, and thebaine, which are used directly or modified using synthetic methods to produce pharmaceutical compounds used for pain management, cough suppression, and addiction.

### SUMMARY

[0006] The present invention relates to materials and methods for identifying regulatory proteins that are associated with regulatory regions, i.e., regulatory proteins that are capable of interacting either directly or indirectly with regulatory regions of genes encoding enzymes in an alkaloid biosynthesis pathway, and thereby modulating expression, e.g., transcription, of such genes. Modulation of expression can include up-regulation or activation, e.g., an increase of expression relative to basal or native states (e.g., a control level). In other cases, modulation of expression can include down-regulation or repression, e.g., a decrease of expression relative to basal or native states, such as the level in a control. In many cases, a regulatory protein is a transcription factor and its associated regulatory region is a promoter. Regulatory proteins identified as being capable of interacting directly or indirectly with regulatory regions of genes encoding enzymes in an alkaloid biosynthesis pathway can be used to create transgenic plants, e.g., plants capable of producing one or more alkaloids. Such plants can have modulated, e.g., increased, amounts and/or rates of biosynthesis of one or more alkaloid compounds. Regulatory proteins can also be used along with their cognate promoters to modulate transcription of one or more endogenous sequences, e.g., alkaloid biosynthesis genes, in a plant cell. Given the variety of uses of the various alkaloid classes of compounds, it would be useful to control selective expression of one or more proteins, including enzymes, regulatory proteins, and other auxiliary proteins, involved in alkaloid biosynthesis, e.g., to regulate biosynthesis of known and/or novel alkaloids.

[0007] In one aspect, a method of determining whether or not a regulatory region is activated by a regulatory protein is provided. The method comprises determining whether or not reporter activity is detected in a plant cell transformed with (a) a recombinant nucleic acid construct comprising a regulatory region operably linked to a nucleic acid encoding a polypeptide having the reporter activity; and (b) a recombinant nucleic acid construct comprising a nucleic acid encoding a regulatory protein comprising a polypeptide sequence having 80% or greater sequence identity to a polypeptide sequence selected from the group consisting of SEQ ID NOs:2-5, SEQ ID NOs:7-16, SEQ ID NOs:18-33, SEQ ID NOs:35-42, SEQ ID NOs:44-61, SEQ ID NOs:63-70, SEQ ID NOs:72-79, SEQ ID NOs:81-86, SEQ ID NOs:88-99, SEQ ID NOs:101-113, SEQ ID NOs:115-122, SEQ ID NOs:124-136, SEQ ID NOs:138-150, SEQ ID NOs:152-156, SEQ ID NOs:158-167, SEQ ID NOs:169-175, SEQ ID NOs:177-188, SEQ ID NOs:190-191, SEQ ID NOs:193-194, SEQ ID NO:196, SEQ ID NO:198, SEQ ID NOs:200-204, SEQ ID NOs:206-215, SEQ ID NO:217, SEQ ID NO:219, SEQ ID NOs:221-236, and the consensus sequences set forth in FIGS. 1-22; where detection of the reporter activity indicates that the regulatory region is activated by the regulatory protein.

[0008] The activation can be direct or indirect. The nucleic acid encoding the regulatory protein can be operably linked to a regulatory region, where the regulatory region is capable of modulating expression of the regulatory protein. The regulatory region capable of modulating expression of the regulatory protein can be a promoter. The promoter can be an organ-preferential promoter, a tissue-preferential promoter, a cell type-preferential promoter, or an inducible promoter. The tissue can be stem, seed pod, reproductive, or parenchymal tissue. The cell can be a laticifer, sieve element, or companion cell.

[0009] The plant cell can be stably transformed with the recombinant nucleic acid construct comprising the regulatory region operably linked to the nucleic acid encoding the polypeptide having the reporter activity and transiently transformed with the recombinant nucleic acid construct comprising the nucleic acid encoding the regulatory protein. The plant cell can be stably transformed with the recombinant nucleic acid construct comprising the nucleic acid encoding the regulatory protein and transiently transformed with the recombinant nucleic acid construct comprising the regulatory region operably linked to the nucleic acid encoding the polypeptide having the reporter activity. The plant cell can be stably transformed with the recombinant nucleic acid construct comprising the nucleic acid encoding the regulatory protein and stably transformed with the recombinant nucleic acid construct comprising the regulatory region operably linked to the nucleic acid encoding the polypeptide having the reporter activity. The plant cell can be transiently transformed with the recombinant nucleic acid construct comprising the nucleic acid encoding the regulatory protein and transiently transformed with the recombinant nucleic acid construct comprising the regulatory region operably linked to the nucleic acid encoding the polypeptide having the reporter activity.

[0010] The reporter activity can be selected from an enzymatic activity and an optical activity. The enzymatic activity can be selected from luciferase activity, neomycin phosphotransferase activity, and phosphinothricin acetyl transferase activity. The optical activity can be bioluminescence, fluorescence, or phosphorescence.

[0011] In another aspect, a method of determining whether or not a regulatory region is activated by a regulatory protein is provided. The method comprises determining whether or not reporter activity is detected in a plant cell transformed with (a) a recombinant nucleic acid construct comprising a regulatory region comprising a nucleic acid having 80% or greater sequence identity to a regulatory region selected from the group consisting of SEQ ID NOs:237-252 operably linked to a nucleic acid encoding a polypeptide having the reporter activity; and (b) a recombinant nucleic acid construct comprising a nucleic acid encoding a regulatory protein. Detection of the reporter activity indicates that the regulatory region is activated by the regulatory protein.

[0012] The regulatory protein can comprise a polypeptide sequence having 80% or greater sequence identity to a polypeptide sequence selected from the group consisting of SEQ ID NOs:2-5, SEQ ID NOs:7-16, SEQ ID NOs:18-33, SEQ ID NOs:35-42, SEQ ID NOs:44-61, SEQ ID NOs:63-70, SEQ ID NOs:72-79, SEQ ID NOs:81-86, SEQ ID NOs:88-99, SEQ ID NOs:101-113, SEQ ID NOs:115-122, SEQ ID NOs:124-136, SEQ ID NOs:138-150, SEQ ID NOs:152-156, SEQ ID NOs:158-167, SEQ ID NOs:169-175, SEQ ID NOs:177-188, SEQ ID NOs:190-191, SEQ ID NOs:193-194, SEQ ID NO:196, SEQ ID NO:198, SEQ ID NOs:200-204, SEQ ID NOs:206-215, SEQ ID NO:217, SEQ ID NO:219, SEQ ID NOs:221-236, and the consensus sequences set forth in FIGS. 1-22.

[0013] In another aspect, a plant cell is provided. The plant cell comprises an exogenous nucleic acid comprising a nucleic acid encoding a regulatory protein comprising a polypeptide sequence having 80% or greater sequence identity to a polypeptide sequence selected from the group consisting of SEQ ID NOs:2-5, SEQ ID NOs:7-16, SEQ ID NOs:18-33, SEQ ID NOs:35-42, SEQ ID NOs:44-61, SEQ ID NOs:63-70, SEQ ID NOs:72-79, SEQ ID NOs:81-86, SEQ ID NOs:88-99, SEQ ID NOs:101-113, SEQ ID NOs:115-122, SEQ ID NOs:124-136, SEQ ID NOs:138-150, SEQ ID NOs:152-156, SEQ ID NOs:158-167, SEQ ID NOs:169-175, SEQ ID NOs:177-188, SEQ ID NOs:190-191, SEQ ID NOs:193-194, SEQ ID NO:196, SEQ ID NO:198, SEQ ID NOs:200-204, SEQ ID NOs:206-215, SEQ ID NO:217, SEQ ID NO:219, SEQ ID NOs:221-236, and the consensus sequences set forth in FIGS. 1-22, where the nucleic acid is operably linked to a regulatory region that modulates transcription of the regulatory protein in the plant cell.

[0014] The regulatory region can be a promoter. The promoter can be a tissue-preferential promoter, a cell type-preferential promoter, or an inducible promoter. The tissue can be stem, seed pod, reproductive, or parenchymal tissue. The cell type can be a laticifer cell, a companion cell, or a sieve element cell. The plant cell can be capable of producing one or more alkaloids. The plant cell can further comprise an endogenous regulatory region that is associated with the regulatory protein. The regulatory protein can modulate transcription of an endogenous gene involved in alkaloid biosynthesis in the cell. The modulation can be an increase in transcription of the endogenous gene. The endogenous gene can comprise a coding sequence for a regulatory protein involved in alkaloid biosynthesis. The endogenous gene can comprise a coding sequence for an alkaloid biosynthesis enzyme.

[0015] The endogenous gene can be a tetrahydrobenzylisoquinoline alkaloid biosynthesis enzyme, a benzophenanthridine alkaloid biosynthesis enzyme, a morphinan alkaloid biosynthesis enzyme, a monoterpenoid indole alkaloid biosynthesis enzyme, a bisbenzylisoquinoline alkaloid biosynthesis enzyme, a pyridine, purine, tropane, or quinoline alkaloid biosynthesis enzyme, a terpenoid, betaine, or phenethylamine alkaloid biosynthesis enzyme, or a steroid alkaloid biosynthesis enzyme.

[0016] The endogenous gene can be selected from the group consisting of tyrosine decarboxylase (YDC or TYD; EC 4.1.1.25), norcoclaurine synthase (EC 4.2.1.78), coclaurine N-methyltransferase (EC 2.1.1.140), (R, S)-norcoclaurine 6-O-methyl transferase (NOMT; EC 2.1.1.128), S-adenosyl-L-methionine:3′-hydroxy-N-methylcoclaurine 4′-O-methyltransferase 1 (HMCOMT1; EC 2.1.1.116); S-adenosyl-L-methionine:3′-hydroxy-N-methylcoclaurine 4′-O-methyltransferase 2 (HMCOMT2; EC 2.1.1.116); monophenol monooxygenase (EC 1.14.18.1), N-methylcoclaurine 3′-hydroxylase (NMCH; EC 1.14.13.71), (R,S)-reticuline 7-O-methyltransferase (ROMT); berbamunine synthase (EC 1.14.21.3), columbamine O-methyltransferase (EC 2.1.1.118), berberine bridge enzyme (BBE; EC 1.21.3.3), reticuline oxidase (EC 1.21.3.4), dehydro reticulinium ion reductase (EC 1.5.1.27), (RS)-1-benzyl-1,2,3,4-tetrahydroisoquinoline N-methyltransferase (EC 2.1.1.115), (S)-scoulerine oxidase (EC 1.14.21.2), (S)-cheilanthifoline oxidase (EC 1.14.21.1), (S)-tetrahydroprotoberberine N-methyltransferase (EC 2.1.1.122), (S)-canadine synthase (EC 1.14.21.5), tetrahydroberberine oxidase (EC 1.3.3.8), and columbamine oxidase (EC 1.21.3.2).

[0017] The endogenous gene can be selected from the group consisting of those coding for dihydrobenzophenanthridine oxidase (EC 1.5.3.12), dihydrosanguinarine 10-hydroxylase (EC 1.14.13.56), 10-hydroxydihydrosanguinarine 10-O-methyltransferase (EC 2.1.1.119), dihydrochelirubine 12-hydroxylase (EC 1.14.13.57), and 12-hydroxydihydrochelirubine 12-O-methyltransferase (EC 2.1.1.120).

[0018] The endogenous gene can be selected from the group consisting of those coding for salutaridinol 7-O-acetyltransferase (SAT; EC 2.3.1.150), salutaridine synthase (EC 1.14.21.4), salutaridine reductase (EC 1.1.1.248), morphine 6-dehydrogenase (EC 1.1.1.218); and codeinone reductase (CR; EC 1.1.1.247).

[0019] The plant cell comprising an exogenous nucleic acid comprising a nucleic acid encoding a regulatory protein comprising a polypeptide sequence having 80% or greater sequence identity to a polypeptide sequence selected from the group consisting of SEQ ID NOs:2-5, SEQ ID NOs:7-16, SEQ ID NOs:18-33, SEQ ID NOs:35-42, SEQ ID NOs:44-61, SEQ ID NOs:63-70, SEQ ID NOs:72-79, SEQ ID NOs:81-86, SEQ ID NOs:88-99, SEQ ID NOs:101-113, SEQ ID NOs:115-122, SEQ ID NOs:124-136, SEQ ID NOs:138-150, SEQ ID NOs:152-156, SEQ ID NOs:158-167, SEQ ID NOs:169-175, SEQ ID NOs:177-188, SEQ ID NOs:190-191, SEQ ID NOs:193-194, SEQ ID NO:196, SEQ ID NO:198, SEQ ID NOs:200-204, SEQ ID NOs:206-215, SEQ ID NO:217, SEQ ID NO:219, SEQ ID NOs:221-236, and the consensus sequences set forth in FIGS. 1-22, can further comprise an exogenous regulatory region operably linked to a sequence of interest. The nucleic acid is operably linked to a regulatory region that modulates transcription of the regulatory protein in the plant cell. The exogenous regulatory region is associated with the regulatory protein. The exogenous regulatory region comprises a nucleic acid having 80% or greater sequence identity to a regulatory region selected from the group consisting of SEQ ID NOs:237-252.

[0020] The sequence of interest can comprise a coding sequence for a polypeptide involved in alkaloid biosynthesis. The polypeptide can be a regulatory protein involved in alkaloid biosynthesis. The polypeptide can be an alkaloid biosynthesis enzyme.

[0021] The enzyme can be a morphinan alkaloid biosynthesis enzyme, a tetrahydrobenzylisoquinoline alkaloid biosynthesis enzyme, or a benzophenanthridine alkaloid biosynthesis enzyme. The enzyme can be a monoterpenoid indole alkaloid biosynthesis enzyme, a bisbenzylisoquinoline alkaloid biosynthesis enzyme, a pyridine, purine, tropane, or quinoline alkaloid biosynthesis enzyme, a terpenoid, betaine, or phenethylamine alkaloid biosynthesis enzyme, or a steroid alkaloid biosynthesis enzyme.

[0022] The enzyme can be selected from the group consisting of salutaridinol 7-O-acetyltransferase (SAT; EC 2.3.1.150), salutaridine synthase (EC 1.14.21.4), salutaridine reductase (EC 1.1.1.248), morphine 6-dehydrogenase (EC 1.1.1.218); and codeinone reductase (CR; EC 1.1.1.247).

[0023] The enzyme can be selected from the group consisting of tyrosine decarboxylase (YDC or TYD; EC 4.1.1.25), norcoclaurine synthase (EC 4.2.1.78), coclaurine N-methyltransferase (EC 2.1.1.140), (R, S)-norcoclaurine 6-O-methyl transferase (NOMT; EC 2.1.1.128), S-adenosyl-L-methionine:3′-hydroxy-N-methylcoclaurine 4′-O-methyltransferase 1 (HMCOMT1; EC 2.1.1.116); S-adenosyl-L-methionine:3′-hydroxy-N-methylcoclaurine 4′-O-methyltransferase 2 (HMCOMT2; EC 2.1.1.116); monophenol monooxygenase (EC1.14.18.1), N-methylcoclaurine 3′-hydroxylase (NMCH; EC 1.14.13.71), (R,S)-reticuline 7-O-methyltransferase (ROMT); berbamunine synthase (EC 1.14.21.3), columbamine O-methyltransferase (EC 2.1.1.118), berberine bridge enzyme (BBE; EC 1.21.3.3), reticuline oxidase (EC 1.21.3.4), dehydro reticulinium ion reductase (EC 1.5.1.27), (RS)-1-benzyl-1,2,3,4-tetrahydroisoquinoline N-methyltransferase (EC 2.1.1.115), (S)-scoulerine oxidase (EC 1.14.21.2), (S)-cheilanthifoline oxidase (EC 1.14.21.1), (S)-tetrahydroprotoberberine N-methyltransferase (EC 2.1.1.122), (S)-canadine synthase (EC 1.14.21.5), tetrahydroberberine oxidase (EC 1.3.3.8), and columbamine oxidase (EC 1.21.3.2).

[0024] The enzyme can be selected from the group consisting of dihydrobenzophenanthridine oxidase (EC 1.5.3.12), dihydrosanguinarine 10-hydroxylase (EC 1.14.13.56), 10-hydroxydihydrosanguinarine 10-O-methyltransferase (EC 2.1.1.119), dihydrochelirubine 12-hydroxylase (EC 1.14.13.57), and 12-hydroxydihydrochelirubine 12-O-methyltransferase (EC 2.1.1.120).

[0025] A plant cell described above can be capable of producing one or more alkaloids. An alkaloid can be a morphinan alkaloid, a morphinan analog alkaloid, a tetrahydrobenzylisoquinoline alkaloid, a benzophenanthridine alkaloid, a monoterpenoid indole alkaloid, a bisbenzylisoquinoline alkaloid, a pyridine, purine, tropane, or quinoline alkaloid, a terpenoid, betaine, or phenethylamine alkaloid, or a steroid alkaloid.

[0026] A plant cell described above can be a member of the Papaveraceae, Menispermaceae, Lauraceae, Euphorbiaceae, Berberidaceae, Leguminosae, Boraginaceae, Apocynaceae, Asclepiadaceae, Liliaceae, Gnetaceae, Erythroxylaceae, Convolvulaceae, Ranunculaeceae, Rubiaceae, Solanaceae, or Rutaceae families. A plant cell described above can be a member of the species Papaver bracteatum, Papaver orientale, Papaver setigerum, Papaver somniferum, Croton salutaris, Croton balsamifera, Sinomenium acutum, Stephania cepharantha, Stephania zippeliana, Litsea sebiferea, Alseodaphne perakensis, Cocculus laurifolius, Duguetia obovata, Rhizocarya racemifera, or Beilschmiedia oreophila.

[0027] A plant cell described above can further comprise a nucleic acid encoding a second regulatory protein operably linked to a second regulatory region that modulates transcription of the second regulatory protein in the plant cell. The nucleic acid encoding a second regulatory protein operably linked to a second regulatory region can be present on a second recombinant nucleic acid construct.

[0028] A regulatory protein-regulatory region association can be effective for modulating the amount of at least one alkaloid compound in the cell. An alkaloid compound can be selected from the group consisting of salutaridine, salutaridinol, salutaridinol acetate, thebaine, isothebaine, papaverine, narcotine, noscapine, narceine, hydrastine, oripavine, morphinone, morphine, codeine, codeinone, and neopinone. An alkaloid compound can be selected from the group consisting of berberine, palmatine, tetrahydropalmatine, S-canadine, columbamine, S-tetrahydrocolumbamine, S-scoulerine, S-cheilathifoline, S-stylopine, S-cis-N-methylstylopine, protopine, 6-hydroxyprotopine, R-norreticuline, S-norreticuline, R-reticuline, S-reticuline, 1,2-dehydroreticuline, S-3′-hydroxycoclaurine, S-norcoclaurine, S-coclaurine, S-N-methylcoclaurine, berbamunine, 2′-norberbamunine, and guatteguamerine. An alkaloid compound can be selected from the group consisting of dihydro-sanguinarine, sanguinarine, dihydroxy-dihydro-sanguinarine, 12-hydroxy-dihydrochelirubine, 10-hydroxy-dihydro-sanguinarine, dihydro-macarpine, dihydro-chelirubine, dihydro-sanguinarine, chelirubine, 12-hydroxy-chelirubine, and macarpine.

[0029] In another aspect, a Papaveraceae plant is provided. The plant comprises an exogenous nucleic acid comprising a nucleic acid encoding a regulatory protein comprising a polypeptide sequence having 80% or greater sequence identity to a polypeptide sequence selected from the group consisting of SEQ ID NOs:2-5, SEQ ID NOs:7-16, SEQ ID NOs:18-33, SEQ ID NOs:35-42, SEQ ID NOs:44-61, SEQ ID NOs:63-70, SEQ ID NOs:72-79, SEQ ID NOs:81-86, SEQ ID NOs:88-99, SEQ ID NOs:101-113, SEQ ID NOs:115-122, SEQ ID NOs:124-136, SEQ ID NOs:138-150, SEQ ID NOs:152-156, SEQ ID NOs:158-167, SEQ ID NOs:169-175, SEQ ID NOs:177-188, SEQ ID NOs:190-191, SEQ ID NOs:193-194, SEQ ID NO:196, SEQ ID NO:198, SEQ ID NOs:200-204, SEQ ID NOs:206-215, SEQ ID NO:217, SEQ ID NO:219, SEQ ID NOs:221-236, and the consensus sequences set forth in FIGS. 1-22, where the nucleic acid is operably linked to a regulatory region that modulates transcription of the regulatory protein in the plant cell.

[0030] In another aspect, a method of expressing a sequence of interest is provided. The method comprises growing a plant cell comprising (a) an exogenous nucleic acid comprising a regulatory region comprising a nucleic acid having 80% or greater sequence identity to a regulatory region selected from the group consisting of SEQ ID NOs:237-252, where the regulatory region is operably linked to a sequence of interest; and (b) an exogenous nucleic acid comprising a nucleic acid encoding a regulatory protein comprising a polypeptide sequence having 80% or greater sequence identity to a polypeptide sequence selected from the group consisting of SEQ ID NOs:2-5, SEQ ID NOs:7-16, SEQ ID NOs:18-33, SEQ ID NOs:35-42, SEQ ID NOs:44-61, SEQ ID NOs:63-70, SEQ ID NOs:72-79, SEQ ID NOs:81-86, SEQ ID NOs:88-99, SEQ ID NOs:101-113, SEQ ID NOs:115-122, SEQ ID NOs:124-136, SEQ ID NOs:138-150, SEQ ID NOs:152-156, SEQ ID NOs:158-167, SEQ ID NOs:169-175, SEQ ID NOs:177-188, SEQ ID NOs:190-191, SEQ ID NOs:193-194, SEQ ID NO:196, SEQ ID NO:198, SEQ ID NOs:200-204, SEQ ID NOs:206-215, SEQ ID NO:217, SEQ ID NO:219, SEQ ID NOs:221-236, and the consensus sequences set forth in FIGS. 1-22. The regulatory region and the regulatory protein are associated. The plant cell is grown under conditions effective for the expression of the regulatory protein.

[0031] In another aspect, a method of expressing an endogenous sequence of interest is provided. The method comprises growing a plant cell comprising an endogenous regulatory region operably linked to a sequence of interest. The endogenous regulatory region comprises a nucleic acid having 80% or greater sequence identity to a regulatory region selected from the group consisting of SEQ ID NOs:237-252. The plant cell further comprises a nucleic acid encoding an exogenous regulatory protein. The exogenous regulatory protein comprises a polypeptide sequence having 80% or greater sequence identity to a polypeptide sequence selected from the group consisting of SEQ ID NOs:2-5, SEQ ID NOs:7-16, SEQ ID NOs:18-33, SEQ ID NOs:35-42, SEQ ID NOs:44-61, SEQ ID NOs:63-70, SEQ ID NOs:72-79, SEQ ID NOs:81-86, SEQ ID NOs:88-99, SEQ ID NOs:101-113, SEQ ID NOs:115-122, SEQ ID NOs:124-136, SEQ ID NOs:138-150, SEQ ID NOs:152-156, SEQ ID NOs:158-167, SEQ ID NOs:169-175, SEQ ID NOs:177-188, SEQ ID NOs:190-191, SEQ ID NOs:193-194, SEQ ID NO:196, SEQ ID NO:198, SEQ ID NOs:200-204, SEQ ID NOs:206-215, SEQ ID NO:217, SEQ ID NO:219, SEQ ID NOs:221-236, and the consensus sequences set forth in FIGS. 1-22. The exogenous regulatory protein and the endogenous regulatory region are associated. The plant cell is grown under conditions effective for the expression of the exogenous regulatory protein.

[0032] In another aspect, a method of expressing an exogenous sequence of interest is provided. The method comprises growing a plant cell comprising an exogenous regulatory region operably linked to a sequence of interest. The exogenous regulatory region comprises a nucleic acid having 80% or greater sequence identity to a regulatory region selected from the group consisting of SEQ ID NOs:237-252. The plant cell further comprises a nucleic acid encoding an endogenous regulatory protein. The endogenous regulatory protein comprises a polypeptide sequence having 80% or greater sequence identity to a polypeptide sequence selected from the group consisting of SEQ ID NOs:2-5, SEQ ID NOs:7-16, SEQ ID NOs:18-33, SEQ ID NOs:35-42, SEQ ID NOs:44-61, SEQ ID NOs:63-70, SEQ ID NOs:72-79, SEQ ID NOs:81-86, SEQ ID NOs:88-99, SEQ ID NOs:101-113, SEQ ID NOs:115-122, SEQ ID NOs:124-136, SEQ ID NOs:138-150, SEQ ID NOs:152-156, SEQ ID NOs:158-167, SEQ ID NOs:169-175, SEQ ID NOs:177-188, SEQ ID NOs:190-191, SEQ ID NOs:193-194, SEQ ID NO:196, SEQ ID NO:198, SEQ ID NOs:200-204, SEQ ID NOs:206-215, SEQ ID NO:217, SEQ ID NO:219, SEQ ID NOs:221-236, and the consensus sequences set forth in FIGS. 1-22. The regulatory region and the regulatory protein are associated. The plant cell is grown under conditions effective for the expression of the endogenous regulatory protein.

[0033] The sequence of interest can comprise a coding sequence for a polypeptide involved in alkaloid biosynthesis. The nucleic acid encoding the exogenous regulatory protein can be operably linked to a regulatory region capable of modulating expression of the exogenous regulatory protein in the plant cell. The regulatory region capable of modulating expression of the exogenous regulatory protein in the plant cell can be selected from a tissue-preferential, cell type-preferential, organ-preferential, or inducible promoter. The regulatory region capable of modulating expression of the exogenous regulatory protein can be a cell type-preferential promoter, where the cell type is a laticifer, sieve element, or companion cell.

[0034] In another aspect, a method of expressing a sequence of interest is provided. The method comprises growing a plant cell comprising an exogenous nucleic acid. The exogenous nucleic acid comprises a nucleic acid encoding a regulatory protein comprising a polypeptide sequence having 80% or greater sequence identity to a polypeptide sequence selected from the group consisting of SEQ ID NOs:2-5, SEQ ID NOs:7-16, SEQ ID NOs:18-33, SEQ ID NOs:35-42, SEQ ID NOs:44-61, SEQ ID NOs:63-70, SEQ ID NOs:72-79, SEQ ID NOs:81-86, SEQ ID NOs:88-99, SEQ ID NOs:101-113, SEQ ID NOs:115-122, SEQ ID NOs:124-136, SEQ ID NOs:138-150, SEQ ID NOs:152-156, SEQ ID NOs:158-167, SEQ ID NOs:169-175, SEQ ID NOs:177-188, SEQ ID NOs:190-191, SEQ ID NOs:193-194, SEQ ID NO:196, SEQ ID NO:198, SEQ ID NOs:200-204, SEQ ID NOs:206-215, SEQ ID NO:217, SEQ ID NO:219, SEQ ID NOs:221-236, and the consensus sequences set forth in FIGS. 1-22. The nucleic acid is operably linked to a regulatory region that modulates transcription of the regulatory protein in the plant cell. The plant cell further comprises an exogenous regulatory region operably linked to a sequence of interest, where the exogenous regulatory region is associated with said regulatory protein, and where the exogenous regulatory region comprises a nucleic acid having 80% or greater sequence identity to a regulatory region selected from the group consisting of SEQ ID NOs:237-252. The plant cell is grown under conditions effective for the expression of the regulatory protein.

[0035] In another aspect, a method of modulating the expression level of one or more endogenous Papaveraceae genes involved in alkaloid biosynthesis is provided. The method comprises transforming a cell of a member of the Papaveraceae family with a recombinant nucleic acid construct, where the nucleic acid construct comprises a nucleic acid encoding a regulatory protein comprising a polypeptide sequence selected from the group consisting of SEQ ID NOs:2-5, SEQ ID NOs:7-16, SEQ ID NOs:18-33, SEQ ID NOs:35-42, SEQ ID NOs:44-61, SEQ ID NOs:63-70, SEQ ID NOs:72-79, SEQ ID NOs:81-86, SEQ ID NOs:88-99, SEQ ID NOs:101-113, SEQ ID NOs:115-122, SEQ ID NOs:124-136, SEQ ID NOs:138-150, SEQ ID NOs:152-156, SEQ ID NOs:158-167, SEQ ID NOs:169-175, SEQ ID NOs:177-188, SEQ ID NOs:190-191, SEQ ID NOs:193-194, SEQ ID NO:196, SEQ ID NO:198, SEQ ID NOs:200-204, SEQ ID NOs:206-215, SEQ ID NO:217, SEQ ID NO:219, SEQ ID NOs:221-236, and the consensus sequences set forth in FIGS. 1-22. The nucleic acid is operably linked to a regulatory region that modulates transcription in the family member.

[0036] In another aspect, a method of producing one or more alkaloids in a plant cell is provided. The method comprises growing a plant cell comprising an exogenous nucleic acid. The exogenous nucleic acid comprises a nucleic acid encoding a regulatory protein comprising a polypeptide sequence having 80% or greater sequence identity to a polypeptide sequence selected from the group consisting of SEQ ID NOs:2-5, SEQ ID NOs:7-16, SEQ ID NOs:18-33, SEQ ID NOs:35-42, SEQ ID NOs:44-61, SEQ ID NOs:63-70, SEQ ID NOs:72-79, SEQ ID NOs:81-86, SEQ ID NOs:88-99, SEQ ID NOs:101-113, SEQ ID NOs:115-122, SEQ ID NOs:124-136, SEQ ID NOs:138-150, SEQ ID NOs:152-156, SEQ ID NOs:158-167, SEQ ID NOs:169-175, SEQ ID NOs:177-188, SEQ ID NOs:190-191, SEQ ID NOs:193-194, SEQ ID NO:196, SEQ ID NO:198, SEQ ID NOs:200-204, SEQ ID NOs:206-215, SEQ ID NO:217, SEQ ID NO:219, SEQ ID NOs:221-236, and the consensus sequences set forth in FIGS. 1-22. The nucleic acid is operably linked to a regulatory region that modulates transcription of the regulatory protein in the plant cell. The plant cell further comprises an endogenous regulatory region that is associated with the regulatory protein. The endogenous regulatory region is operably linked to a sequence of interest comprising a coding sequence for a polypeptide involved in alkaloid biosynthesis. The plant cell is capable of producing one or more alkaloids. The plant cell is grown under conditions effective for the expression of the regulatory protein.

[0037] In another aspect, a method of producing one or more alkaloids in a plant cell is provided. The method comprises growing a plant cell comprising an exogenous nucleic acid. The exogenous nucleic acid comprises a nucleic acid encoding a regulatory protein comprising a polypeptide sequence having 80% or greater sequence identity to a polypeptide sequence selected from the group consisting of SEQ ID NOs:2-5, SEQ ID NOs:7-16, SEQ ID NOs:18-33, SEQ ID NOs:35-42, SEQ ID NOs:44-61, SEQ ID NOs:63-70, SEQ ID NOs:72-79, SEQ ID NOs:81-86, SEQ ID NOs:88-99, SEQ ID NOs:101-113, SEQ ID NOs:115-122, SEQ ID NOs:124-136, SEQ ID NOs:138-150, SEQ ID NOs:152-156, SEQ ID NOs:158-167, SEQ ID NOs:169-175, SEQ ID NOs:177-188, SEQ ID NOs:190-191, SEQ ID NOs:193-194, SEQ ID NO:196, SEQ ID NO:198, SEQ ID NOs:200-204, SEQ ID NOs:206-215, SEQ ID NO:217, SEQ ID NO:219, SEQ ID NOs:221-236, and the consensus sequences set forth in FIGS. 1-22. The nucleic acid is operably linked to a regulatory region that modulates transcription of the regulatory protein in the plant cell. The plant cell further comprises an exogenous regulatory region operably linked to a sequence of interest. The exogenous regulatory region is associated with the regulatory protein, and the exogenous regulatory region comprises a nucleic acid having 80% or greater sequence identity to a regulatory region selected from the group consisting of SEQ ID NOs:237-252. The sequence of interest comprises a coding sequence for a polypeptide involved in alkaloid biosynthesis. The plant cell is grown under conditions effective for the expression of the regulatory protein.

[0038] In another aspect, a method of modulating an amount of one or more alkaloid compounds in a Papaveraceae family member is provided. The method comprises transforming a member of the Papaveraceae family with a recombinant nucleic acid construct. The nucleic acid construct comprises a nucleic acid encoding a regulatory protein comprising a polypeptide sequence selected from the group consisting of SEQ ID NOs:2-5, SEQ ID NOs:7-16, SEQ ID NOs:18-33, SEQ ID NOs:35-42, SEQ ID NOs:44-61, SEQ ID NOs:63-70, SEQ ID NOs:72-79, SEQ ID NOs:81-86, SEQ ID NOs:88-99, SEQ ID NOs:101-113, SEQ ID NOs:115-122, SEQ ID NOs:124-136, SEQ ID NOs:138-150, SEQ ID NOs:152-156, SEQ ID NOs:158-167, SEQ ID NOs:169-175, SEQ ID NOs:177-188, SEQ ID NOs:190-191, SEQ ID NOs:193-194, SEQ ID NO:196, SEQ ID NO:198, SEQ ID NOs:200-204, SEQ ID NOs:206-215, SEQ ID NO:217, SEQ ID NO:219, SEQ ID NOs:221-236, and the consensus sequences set forth in FIGS. 1-22. The nucleic acid is operably linked to a regulatory region that modulates transcription in the family member.

[0039] Unless otherwise defined, all technical and scientific terms used herein have the same meaning as commonly understood by one of ordinary skill in the art to which this invention pertains. Although methods and materials similar or equivalent to those described herein can be used to practice the invention, suitable methods and materials are described below. All publications, patent applications, patents, and other references mentioned herein are incorporated by reference in their entirety. In case of conflict, the present specification, including definitions, will control. In addition, the materials, methods, and examples are illustrative only and not intended to be limiting.

[0040] The details of one or more embodiments of the invention are set forth in the accompanying drawings and the description below. Other features, objects, and advantages of the invention will be apparent from the description and drawings, and from the claims.

### DESCRIPTION OF THE DRAWINGS

[0041] FIG. 1 is an alignment of the amino acid sequence of Lead cDNA ID 23356923 (SEQ ID NO:2) with homologous and/or orthologous amino acid sequences gi|51970702 (SEQ ID NO:3), CeresClone:871060 (SEQ ID NO:4), and CeresClone: 1069147 (SEQ ID NO:5). The consensus sequence determined by the alignment is set forth.

[0042] FIG. 2 is an alignment of the amino acid sequence of Lead cDNA ID 23357249 (SEQ ID NO:7) with homologous and/or orthologous amino acid sequences CeresClone:1388283 (SEQ ID NO:8), gi|1778374 (SEQ ID NO:9), gi|7439995 (SEQ ID NO:10), gi|7489099 (SEQ ID NO:11), gi|34906972 (SEQ ID NO:12), CeresClone:536457 (SEQ ID NO:13), CeresClone:744170 (SEQ ID NO:14), CeresClone:579861 (SEQ ID NO:15), and gi|21388662 (SEQ ID NO:16). The consensus sequence determined by the alignment is set forth.

[0043] FIG. 3 is an alignment of the amino acid sequence of Lead cDNA ID 23358452 (SEQ ID NO:18) with homologous and/or orthologous amino acid sequences CeresClone:873113 (SEQ ID NO:19), CeresClone:956177 (SEQ ID NO:20), CeresClone:721511 (SEQ ID NO:21), CeresClone:641329 (SEQ ID NO:22), CeresClone:782784 (SEQ ID NO:23), gi|18645 (SEQ ID NO:24), gi|1052956 (SEQ ID NO:25), gi|436424 (SEQ ID NO:26), gi|2894109 (SEQ ID NO:27), CeresClone:686294 (SEQ ID NO:28), gi|50726318 (SEQ ID NO:29), gi|729737 (SEQ ID NO:30), gi|729736 (SEQ ID NO:31), CeresClone:1060767 (SEQ ID NO:32), and gi|7446231 (SEQ ID NO:33). The consensus sequence determined by the alignment is set forth.

[0044] FIG. 4 is an alignment of the amino acid sequence of Lead cDNA ID 23360114 (SEQ ID NO:35) with homologous and/or orthologous amino acid sequences CeresClone:1382382 (SEQ ID NO:36), CeresClone:1561543 (SEQ ID NO:37), gi|51964362 (SEQ ID NO:38), CeresClone:557109 (SEQ ID NO:39), gi|50912679 (SEQ ID NO:40), gi|51535177 (SEQ ID NO:41), and CeresClone:888753 (SEQ ID NO:42). The consensus sequence determined by the alignment is set forth.

[0045] FIG. 5 is an alignment of the amino acid sequence of Lead cDNA ID 23366941 (SEQ ID NO:44) with homologous and/or orthologous amino acid sequences gi|12324817 (SEQ ID NO:45), gi|55584076 (SEQ ID NO:46), CeresClone:303971 (SEQ ID NO:47), gi|16516825 (SEQ ID NO:50), CeresClone:1000657 (SEQ ID NO:52), gi|16516823 (SEQ ID NO:53), gi|2982285 (SEQ ID NO:54), CeresClone:963426 (SEQ ID NO:55), CeresClone:682557 (SEQ ID NO:56), gi|59042581 (SEQ ID NO:58), CeresClone:602368 (SEQ ID NO:59), and CeresClone:1114184 (SEQ ID NO:61). The consensus sequence determined by the alignment is set forth.

[0046] FIG. 6 is an alignment of the amino acid sequence of Lead cDNA ID 23371050 (SEQ ID NO:63) with homologous and/or orthologous amino acid sequences CeresClone:962327 (SEQ ID NO:64), CeresClone:1101577 (SEQ ID NO:65), CeresClone:634261 (SEQ ID NO:66), gi|5031281 (SEQ ID NO:67), gi|35187687 (SEQ ID NO:68), gi|34978689 (SEQ ID NO:69), and gi|34909836 (SEQ ID NO:70). The consensus sequence determined by the alignment is set forth.

[0047] FIG. 7 is an alignment of the amino acid sequence of Lead cDNA ID 23383878 (SEQ ID NO:72) with homologous and/or orthologous amino acid sequences CeresClone:94850 (SEQ ID NO:73), gi|21689807 (SEQ ID NO:74), gi|18391322 (SEQ ID NO:75), CeresClone:17426 (SEQ ID NO:76), CeresClone:11593 (SEQ ID NO:77), CeresClone:1087844 (SEQ ID NO:78), and CeresClone:963628 (SEQ ID NO:79). The consensus sequence determined by the alignment is set forth.

[0048] FIG. 8 is an alignment of the amino acid sequence of Lead cDNA ID 23385144 (SEQ ID NO:81) with homologous and/or orthologous amino acid sequences CeresClone:473126 (SEQ ID NO:82), gi|54287494 (SEQ ID NO:83), and CeresClone:238614 (SEQ ID NO:84). The consensus sequence determined by the alignment is set forth.

[0049] FIG. 9 is an alignment of the amino acid sequence of Lead cDNA ID 23385649 (SEQ ID NO:88) with homologous and/or orthologous amino acid sequences CeresClone:474636 (SEQ ID NO:89), CeresClone:1057375 (SEQ ID NO:90), CeresClone:1027534 (SEQ ID NO:91), gi|1632831 (SEQ ID NO:92), gi|5669634 (SEQ ID NO:93), gi|8895787 (SEQ ID NO:94), CeresClone:638899 (SEQ ID NO:95), CeresClone:348434 (SEQ ID NO:96), CeresClone:1607224 (SEQ ID NO:97), gi|50725389 (SEQ ID NO:98), and gi|19225065 (SEQ ID NO:99). The consensus sequence determined by the alignment is set forth.

[0050] FIG. 10 is an alignment of the amino acid sequence of Lead 532H5 (cDNA ID 23387851; SEQ ID NO:101) with homologous and/or orthologous amino acid sequences gi|50253268 (SEQ ID NO:102), gi|45826359 (SEQ ID NO:103), gi|45826360 (SEQ ID NO:104), gi|37993864 (SEQ ID NO:105), CeresClone:707775 (SEQ ID NO:106), gi|38257023 (SEQ ID NO:107), gi|37147896 (SEQ ID NO:108), gi|41351817 (SEQ ID NO:109), gi|55824656 (SEQ ID NO:110), gi|66269671 (SEQ ID NO:111), gi|33638194 (SEQ ID NO:112), and gi|21908034 (SEQ ID NO:113). The consensus sequence determined by the alignment is set forth.

[0051] FIG. 11 is an alignment of the amino acid sequence of Lead cDNA ID 23387900 (SEQ ID NO:115) with homologous and/or orthologous amino acid sequences CeresClone: 118184 (SEQ ID NO:116), CeresClone: 118878 (SEQ ID NO:117), CeresClone:3929 (SEQ ID NO:118), CeresClone:12459 (SEQ ID NO:119), CeresClone: 1354021 (SEQ ID NO:120), gi|30017217 (SEQ ID NO:121), and CeresClone:109026 (SEQ ID NO:122). The consensus sequence determined by the alignment is set forth.

[0052] FIG. 12 is an alignment of the amino acid sequence of Lead cDNA ID 23401690 (SEQ ID NO:124) with homologous and/or orthologous amino acid sequences CeresClone:605218 (SEQ ID NO:125), gi|57012759 (SEQ ID NO:126), CeresClone:6397 (SEQ ID NO:127), CeresClone:282666 (SEQ ID NO:128), gi|32401273 (SEQ ID NO:129), CeresClone:592713 (SEQ ID NO:130), gi|3342211 (SEQ ID NO:131), gi|57012876 (SEQ ID NO:132), CeresClone:555364 (SEQ ID NO:133), CeresClone:944101 (SEQ ID NO:134), CeresClone:569593 (SEQ ID NO:135), and gi|50927517 (SEQ ID NO:136). The consensus sequence determined by the alignment is set forth.

[0053] FIG. 13 is an alignment of the amino acid sequence of Lead cDNA ID 23416527 (SEQ ID NO:138) with homologous and/or orthologous amino acid sequences gi|14140141 (SEQ ID NO:139), gi|7385636 (SEQ ID NO:141), gi|50927517 (SEQ ID NO:142), gi|32401273 (SEQ ID NO:143), gi|3342211 (SEQ ID NO:144), CeresClone:605218 (SEQ ID NO:145), gi|57012759 (SEQ ID NO:146), gi|57012876 (SEQ ID NO:147), and CeresClone:569593 (SEQ ID NO:149). The consensus sequence determined by the alignment is set forth.

[0054] FIG. 14 is an alignment of the amino acid sequence of Lead cDNA ID 23419038 (SEQ ID NO:152) with homologous and/or orthologous amino acid sequences CeresClone:473902 (SEQ ID NO:153), CeresCione: 1469452 (SEQ ID NO:154), gi|41351817(SEQ ID NO:155), and gi|33324520 (SEQ ID NO:156). The consensus sequence determined by the alignment is set forth.

[0055] FIG. 15 is an alignment of the amino acid sequence of Lead cDNA ID 23427553 (SEQ ID NO:158) with homologous and/or orthologous amino acid sequences CeresClone:956457 (SEQ ID NO:159), CeresClone:1172789 (SEQ ID NO:160), CeresClone:480785 (SEQ ID NO:161), CeresClone:859154 (SEQ ID NO:162), CeresClone:407007 (SEQ ID NO:163), gi|13936312 (SEQ ID NO:164), CeresClone:283597 (SEQ ID NO:165), CeresClone:443626 (SEQ ID NO:166), and gi|13936314 (SEQ ID NO:167). The consensus sequence determined by the alignment is set forth.

[0056] FIG. 16 is an alignment of the amino acid sequence of Lead cDNA ID 23472397 (SEQ ID NO:169) with homologous and/or orthologous amino acid sequences CeresClone:554743 (SEQ ID NO:170), CeresClone:1623097 (SEQ ID NO:171), gi|3341468 (SEQ ID NO:172), CeresClone:1120474 (SEQ ID NO:173), CeresClone:729860 (SEQ ID NO:174), and gi|37051131 (SEQ ID NO:175). The consensus sequence determined by the alignment is set forth.

[0057] FIG. 17 is an alignment of the amino acid sequence of Lead cDNA ID 23522373 (5110H5; SEQ ID NO:177) with homologous and/or orthologous amino acid sequences gi|3608135 (SEQ ID NO:178), gi|3336903 (SEQ ID NO:180), CeresClone:545441 (SEQ ID NO:181), gi|5381313 (SEQ ID NO:182), gi|3336906 (SEQ ID NO:183), gi|13775109 (SEQ ID NO:184), gi|435942 (SEQ ID NO:185), and CeresClone:287677 (SEQ ID NO:188). The consensus sequence determined by the alignment is set forth.

[0058] FIG. 18 is an alignment of the amino acid sequence of Lead cDNA ID 23655935 (5110C8; SEQ ID NO: 190) with homologous and/or orthologous amino acid sequence gi|50928937 (SEQ ID NO:191). The consensus sequence determined by the alignment is set forth.

[0059] FIG. 19 is an alignment of the amino acid sequence of Lead cDNA ID 24365511 (5110E8; SEQ ID NO:193) with homologous and/or orthologous amino acid sequence gi|52076911 (SEQ ID NO:194). The consensus sequence determined by the alignment is set forth.

[0060] FIG. 20 is an alignment of the amino acid sequence of Lead cDNA ID 23377122 (SEQ ID NO:200) with homologous and/or orthologous amino acid sequences CeresClone:467905 (SEQ ID NO:201), gi|50907599 (SEQ ID NO:202), CeresClone:826195 (SEQ ID NO:203), and CeresClone:450772 (SEQ ID NO:204). The consensus sequence determined by the alignment is set forth.

[0061] FIG. 21 is an alignment of the amino acid sequence of Lead cDNA ID 23388445 (SEQ ID NO:206) with homologous and/or orthologous amino acid sequences CeresClone:538877 (SEQ ID NO:212), gi|50907243 (SEQ ID NO:213), CeresClone:260992 (SEQ ID NO:214), and CeresClone:634320 (SEQ ID NO:215). The consensus sequence determined by the alignment is set forth.

[0062] FIG. 22 is an alignment of the amino acid sequence of Lead cDNA ID 23704869 (SEQ ID NO:221) with homologous and/or orthologous amino acid sequences CeresClone:295738 (SEQ ID NO:224), gi|7489532 (SEQ ID NO:227), gi|1076760 (SEQ ID NO:233), gi|463212 (SEQ ID NO:235), and gi|21435101 (SEQ ID NO:236). The consensus sequence determined by the alignment is set forth.

### DETAILED DESCRIPTION

[0063] Although a number of plant transcription factors are known, as well as certain promoters and promoter motifs to which these transcription factors bind, there has been considerable uncertainty regarding the full range of promoters and promoter motifs that are recognized by a particular transcription factor. Applicants have discovered novel methods of screening for combinations, or associations, of regulatory proteins and regulatory regions. These discoveries can be used to create plant cells and plants containing 1) a nucleic acid encoding a regulatory protein, and/or 2) a nucleic acid including a regulatory region associated with a given regulatory protein, e.g., to modulate expression of a sequence of interest operably linked to the regulatory region.

[0064] Thus, in one aspect, the invention features a method for identifying a regulatory protein capable of activating a regulatory region. The method involves screening for the ability of the regulatory protein to modulate expression of a reporter that is operably linked to the regulatory region. The ability of the regulatory protein to modulate expression of the reporter is determined by monitoring reporter activity.

[0065] A regulatory protein and a regulatory region are considered to be “associated” when the regulatory protein is capable of modulating expression, either directly or indirectly, of a nucleic acid operably linked to the regulatory region. For example, a regulatory protein and a regulatory region can be said to be associated when the regulatory protein directly binds to the regulatory region, as in a transcription factor-promoter complex. In other cases, a regulatory protein and regulatory region can be said to be associated when the regulatory protein does not directly bind to the regulatory region. A regulatory protein and a regulatory region can also be said to be associated when the regulatory protein indirectly affects transcription by being a component of a protein complex involved in transcriptional regulation or by noncovalently binding to a protein complex involved in transcriptional regulation. In some cases, a regulatory protein and regulatory region can be said to be associated and indirectly affect transcription when the regulatory protein participates in or is a component of a signal transduction cascade or a proteasome degradation pathway, e.g., of repressors, that results in transcriptional amplification or repression. In some cases, regulatory proteins associate with regulatory regions and indirectly affect transcription by, e.g., binding to methylated DNA, unwinding chromatin, binding to RNA, or modulating splicing.

[0066] A regulatory protein and its associated regulatory region can be used to selectively modulate expression of a sequence of interest, when such a sequence is operably linked to the regulatory region. In addition, the use of such regulatory protein-regulatory region associations in plants can permit selective modulation of the amount or rate of biosynthesis of plant polypeptides and plant compounds, such as alkaloid compounds, under a desired environmental condition or in a desired plant developmental pathway. For example, the use of recombinant regulatory proteins in plants, such as Papaveraceae plants, that are capable of producing one or more alkaloids, can permit selective modulation of the amount of such compounds in such plants.

Polypeptides

[0067] The term “polypeptide” as used herein refers to a compound of two or more subunit amino acids, amino acid analogs, or other peptidomimetics, regardless of post-translational modification, e.g., phosphorylation or glycosylation. The subunits may be linked by peptide bonds or other bonds such as, for example, ester or ether bonds. The term “amino acid” refers to natural and/or unnatural or synthetic amino acids, including D/L optical isomers. Full-length proteins, analogs, mutants, and fragments thereof are encompassed by this definition.

[0068] The term “isolated” with respect to a polypeptide refers to a polypeptide that has been separated from cellular components that naturally accompany it. Typically, the polypeptide is isolated when it is at least 60%, e.g., 70%, 80%, 90%, 95%, or 99%, by weight, free from proteins and naturally occurring organic molecules that are naturally associated with it. In general, an isolated polypeptide will yield a single major band on a reducing and/or non-reducing polyacrylamide gel. Isolated polypeptides can be obtained, for example, by extraction from a natural source (e.g., plant tissue), chemical synthesis, or by recombinant production in a host plant cell. To recombinantly produce a polypeptide, a nucleic acid sequence containing a nucleotide sequence encoding a polypeptide of interest can be ligated into an expression vector and used to transform a bacterial, eukaryotic, or plant host cell, e.g., insect, yeast, mammalian, or plant cells.

[0069] Polypeptides described herein include regulatory proteins. Such a regulatory protein typically is effective for modulating transcription of a coding sequence, e.g., an endogenous regulatory protein, such as an endogenous transcription factor, involved in alkaloid biosynthesis pathways; other endogenous auxiliary proteins involved in transcription, e.g., of polypeptides involved in alkaloid biosynthesis pathways; or an endogenous enzyme involved in alkaloid biosynthesis. Modulation of transcription of a coding sequence can be either an increase or a decrease in transcription of the coding sequence relative to the average rate or level of transcription of the coding sequence in a control plant.

[0070] A regulatory protein can contain an AP2 domain characteristic of polypeptides belonging to the AP2/EREBP family of plant transcription factor polypeptides. AP2 (APETALA2) and EREBPs (ethylene-responsive element binding proteins) are prototypic members of a family of transcription factors unique to plants, whose distinguishing characteristic is that they contain the so-called AP2 DNA-binding domain. AP2/EREBP genes form a large multigene family encoding polypeptides that play a variety of roles throughout the plant life cycle: from being key regulators of several developmental processes, such as floral organ identity determination and control of leaf epidermal cell identity, to forming part of the mechanisms used by plants to respond to various types of biotic and environmental stress. SEQ ID NO:2, SEQ ID NO:101, SEQ ID NO:124, SEQ ID NO:138, SEQ ID NO:152, and SEQ ID NO:217 set forth the amino acid sequences of DNA clones, identified herein as cDNA ID 23356923 (SEQ ID NO:1), cDNA ID 23387851 (SEQ ID NO:100), cDNA ID 23401690 (SEQ ID NO:123), cDNA ID 23416527 (SEQ ID NO:137), cDNA ID 23419038 (SEQ ID NO:151), and cDNA ID 23395214 (SEQ ID NO:216), respectively, that are predicted to encode AP2 domain-containing transcription factor polypeptides.

[0071] A regulatory protein can comprise the amino acid sequence set forth in SEQ ID NO:2, SEQ ID NO:101, SEQ ID NO:124, SEQ ID NO:138, SEQ ID NO:152, or SEQ ID NO:217. Alternatively, a regulatory protein can be a homolog, ortholog, or variant of the polypeptide having the amino acid sequence set forth in SEQ ID NO:2, SEQ ID NO:101, SEQ ID NO:124, SEQ ID NO:138, SEQ ID NO:152, or SEQ ID NO:217. For example, a regulatory protein can have an amino acid sequence with at least 30% sequence identity, e.g., 30%, 35%, 41%, 45%, 47%, 48%, 49%, 50%, 51%, 52%, 56%, 57%, 60%, 61%, 62%, 63%, 64%, 65%, 67%, 68%, 70%, 75%, 80%, 85%, 90%, 95%, 97%, 98%, or 99% sequence identity, to the amino acid sequence set forth in SEQ ID NO:2, SEQ ID NO:101, SEQ ID NO:124, SEQ ID NO:138, SEQ ID NO:152, or SEQ ID NO:217.

[0072] Amino acid sequences of homologs and/or orthologs of the polypeptide having the amino acid sequence set forth in SEQ ID NO:2, SEQ ID NO:101, SEQ ID NO:124, SEQ ID NO:138, or SEQ ID NO:152 are provided in FIG. 1, FIG. 10, FIG. 12, FIG. 13, or FIG. 14, respectively. Each of FIG. 1, FIG. 10, FIG. 12, FIG. 13, and FIG. 14 also includes a consensus amino acid sequence determined by aligning homologous and/or orthologous amino acid sequences with the amino acid sequence set forth in SEQ ID NO:2, SEQ ID NO:101, SEQ ID NO:124, SEQ ID NO:138, or SEQ ID NO:152, respectively.

[0073] For example, the alignment in FIG. 1 provides the amino acid sequences of cDNA ID 23356923 (SEQ ID NO:2), gi|51970702 (SEQ ID NO:3), CeresClone:871060 (SEQ ID NO:4), and CeresClone:1069147 (SEQ ID NO:5).

[0074] The alignment in FIG. 10 provides the amino acid sequences of 532H5 (cDNA ID 23387851; SEQ ID NO:101), gi|50253268 (SEQ ID NO:102), gi|45826359 (SEQ ID NO:103), gi|45826360 (SEQ ID NO:104), gi|37993864 (SEQ ID NO:105), CeresClone:707775 (SEQ ID NO:106), gi|38257023 (SEQ ID NO:107), gi|37147896 (SEQ ID NO:108), gi|41351817 (SEQ ID NO:109), gi|55824656 (SEQ ID NO:110), gi|66269671 (SEQ ID NO:111), gi|33638194 (SEQ ID NO:112), and gi|21908034 (SEQ ID NO:113).

[0075] The alignment in FIG. 12 provides the amino acid sequences of cDNA ID 23401690 (SEQ ID NO:124), CeresClone:605218 (SEQ ID NO:125), gi|57012759 (SEQ ID NO:126), CeresClone:6397 (SEQ ID NO:127), CeresClone:282666 (SEQ ID NO:128), gi|32401273 (SEQ ID NO:129), CeresClone:592713 (SEQ ID NO:130), gi|3342211 (SEQ ID NO:131), gi|57012876 (SEQ ID NO:132), CeresClone:555364 (SEQ ID NO:133), CeresClone:944101 (SEQ ID NO:134), CeresClone:569593 (SEQ ID NO:135), and gi|50927517 (SEQ ID NO:136).

[0076] The alignment in FIG. 13 provides the amino acid sequences of cDNA ID 23416527 (SEQ ID NO:138), gi|14140141 (SEQ ID NO:139), gi|17385636 (SEQ ID NO:141), gi|50927517 (SEQ ID NO:142), gi|32401273 (SEQ ID NO:143), gi|3342211 (SEQ ID NO:144), CeresClone:605218 (SEQ ID NO:145), gi|57012759 (SEQ ID NO:146), gi|57012876 (SEQ ID NO:147), and CeresClone:569593 (SEQ ID NO:149). Other homologs and/or orthologs of SEQ ID NO:138 include gi|56567585 (SEQ ID NO:140), CeresClone:398626 (SEQ ID NO:148), and CeresClone:555364 (SEQ ID NO:150).

[0077] The alignment in FIG. 14 provides the amino acid sequences of cDNA ID 23419038 (SEQ ID NO:152), CeresClone:473902 (SEQ ID NO:153), CeresClone: 1469452 (SEQ ID NO:154), gi|41351817 (SEQ ID NO:155), and gi|33324520 (SEQ ID NO:156).

[0078] In some cases, a regulatory protein can include a polypeptide having at least 80% sequence identity, e.g., 80%, 85%, 90%, 93%, 95%, 97%, 98%, or 99% sequence identity, to an amino acid sequence corresponding to any of SEQ ID NOs:3-5, SEQ ID NOs:102-113, SEQ ID NOs:125-136, SEQ ID NOs:139-150, SEQ ID NOs:153-156, or the consensus sequences set forth in FIG. 1, FIG. 10, FIG. 12, FIG. 13, or FIG. 14.

[0079] A regulatory protein can have one or more domains characteristic of a zinc finger transcription factor polypeptide. For example, a regulatory protein can contain a zf-C3HC4 domain characteristic of a C3HC4 type (RING finger) zinc-finger polypeptide. The RING finger is a specialized type of zinc-finger of 40 to 60 residues that binds two atoms of zinc and is reported to be involved in mediating protein-protein interactions. There are two different variants, the C3HC4-type and a C3H2C3-type, which are related despite the different cysteine/histidine pattern. The RING domain has been implicated in diverse biological processes. Ubiquitin-protein ligases (E3s), which determine the substrate specificity for ubiquitylation, have been classified into HECT and RING-finger families. Various RING fingers exhibit binding to E2 ubiquitin-conjugating enzymes. SEQ ID NO:35 sets forth the amino acid sequence of a DNA clone, identified herein as cDNA ID 23360114 (SEQ ID NO:34), that is predicted to encode a C3HC4 type (RING finger) zinc-finger polypeptide.

[0080] In some cases, a regulatory protein can contain a zf-C3HC4 domain and a zf-CCCH domain characteristic of C-x8-C-x5-C-x3-H type (and similar) zinc finger transcription factor polypeptides. Polypeptides containing zinc finger domains of the C-x8-C-x5-C-x3-H type include zinc finger polypeptides from eukaryotes involved in cell cycle or growth phase-related regulation, e.g. human TIS11B (butyrate response factor 1), a predicted regulatory protein involved in regulating the response to growth factors. Another protein containing this domain is the human splicing factor U2AF 35 kD subunit, which plays a role in both constitutive and enhancer-dependent splicing by mediating essential protein-protein interactions and protein-RNA interactions required for 3′ splice site selection. It has been shown that different CCCH zinc finger proteins interact with the 3′ untranslated regions of various mRNAs. SEQ ID NO:206 sets forth the amino acid sequence of a DNA clone, identified herein as cDNA ID 23388445 (SEQ ID NO:205), that is predicted to encode a zinc finger transcription factor polypeptide having a zf-CCCH and a zf-C3HC4 domain.

[0081] In some cases, a regulatory protein can contain a zf-CCCH domain and a YTH domain characteristic of a YT521-B-like family polypeptide. The YT521-B-like family contains YT521-B, a putative splicing factor from rat. YT521-B is a tyrosine-phosphorylated nuclear protein that interacts with the nuclear transcriptosomal component scaffold attachment factor B and the 68 kDa Src substrate associated during mitosis, Sam68. In vivo splicing assays have reportedly demonstrated that YT521-B can modulate alternative splice site selection in a concentration-dependent manner. The domain is predicted to have four alpha helices and six beta strands. SEQ ID NO:193 sets forth the amino acid sequence of a DNA clone, identified herein as cDNA ID 24365511 (SEQ ID NO192), that is predicted to encode a polypeptide having a zf-CCCH domain and a YTH domain.

[0082] In some cases, a regulatory protein can contain a zf-Dof domain characteristic of a Dof domain zinc finger transcription factor polypeptide. Dof (DNA-binding with one finger) domain polypeptides are plant-specific transcription factor polypeptides with a highly conserved DNA-binding domain. A Dof domain is a zinc finger DNA-binding domain that shows resemblance to the Cys2 zinc finger, although it has a longer putative loop where an extra Cys residue is conserved. AOBP, a DNA-binding protein in pumpkin (Cucurbita maxima), contains a 52 amino acid Dof domain, which is highly conserved in several DNA-binding proteins of higher plants. SEQ ID NO:169 sets forth the amino acid sequence of a DNA clone, identified herein as cDNA ID 23472397 (SEQ ID NO:168), that is predicted to encode a Dof domain zinc finger transcription factor polypeptide.

[0083] In some cases, a regulatory protein can contain a zf-CW domain characteristic of a CW-type zinc finger transcription factor polypeptide. The zf-CW domain is predicted to be a highly specialized mononuclear four-cysteine zinc finger that plays a role in DNA binding and/or promoting protein-protein interactions in complicated eukaryotic processes including chromatin methylation status and early embryonic development. The zf-CW domain is found exclusively in vertebrates, vertebrate-infecting parasites and higher plants. A regulatory protein having a zf-CW domain can also have a methyl-CpG binding domain (MBD). Regulatory proteins with a methyl-binding domain, in association with other proteins, have preferential binding affinity to methylated DNA, which results in changes in chromatin structure leading to transcriptional activation or transcriptional repression of affected genes. SEQ ID NO:158 and SEQ ID NO:219 set forth the amino acid sequences of DNA clones, referred to herein as cDNA ID 23427553 (SEQ ID NO:157) and cDNA ID 23447935 (SEQ ID NO:218), respectively, that are predicted to encode polypeptides containing zf-CW and methyl-CpG binding domains.

[0084] In some cases, a regulatory protein can contain a zf-AN1 domain characteristic of an AN1-like zinc finger transcription factor polypeptide. The zf-AN1 domain was first identified as a zinc finger at the C-terminus of An 1, a ubiquitin-like protein in Xenopus laevis. The following pattern describes the zinc finger: C-X2-C-X(9-12)-C-X(11-2)-C-X4-C-X2-H-X5-H-X-C, where X can be any amino acid, and the numbers in brackets indicate the number of residues. A zf-AN1 domain has been identified in a number of as yet uncharacterized proteins from various sources. A regulatory protein having a zf-AN1 domain can also have a zf-A20 domain. A20 (an inhibitor of cell death)-like zinc fingers are believed to mediate self-association in A20. These fingers also mediate IL-1-induced NF-kappa B activation. SEQ ID NO:63 sets forth the amino acid sequence of a DNA clone, referred to herein as cDNA ID 23371050 (SEQ ID NO:62) that is predicted to encode a zinc finger transcription factor polypeptide having a zf-AN1 domain and a zf-A20 domain.

[0085] A regulatory protein can comprise the amino acid sequence set forth in SEQ ID NO:35, SEQ ID NO:206, SEQ ID NO:193, SEQ ID NO:169, SEQ ID NO:158, SEQ ID NO:219, or SEQ ID NO:63. Alternatively, a regulatory protein can be a homolog, ortholog, or variant of the polypeptide having the amino acid sequence set forth in SEQ ID NO:35, SEQ ID NO:206, SEQ ID NO:193, SEQ ID NO:169, SEQ ID NO:158, SEQ ID NO:219, or SEQ ID NO:63. For example, a regulatory protein can have an amino acid sequence with at least 30% sequence identity, e.g., 31%, 35%, 40%, 45%, 47%, 48%, 49%, 50%, 51%, 52%, 56%, 57%, 60%, 61%, 62%, 63%, 64%, 65%, 67%, 68%, 70%, 75%, 80%, 85%, 90%, 95%, 97%, 98%, or 99% sequence identity, to the amino acid sequence set forth in SEQ ID NO:35, SEQ ID NO:206, SEQ ID NO:193, SEQ ID NO:169, SEQ ID NO:158, SEQ ID NO:219, or SEQ ID NO:63.

[0086] Amino acid sequences of homologs and/or orthologs of the polypeptide having the amino acid sequence set forth in SEQ ID NO:35, SEQ ID NO:206, SEQ ID NO:193, SEQ ID NO:169, SEQ ID NO:158, and SEQ ID NO:63 are provided in FIG. 4, FIG. 21, FIG. 19, FIG. 16, FIG. 15, and FIG. 6, respectively. Each of FIG. 4, FIG. 21, FIG. 19, FIG. 16, FIG. 15, and FIG. 6 also includes a consensus amino acid sequence determined by aligning homologous and/or orthologous amino acid sequences with the amino acid sequence set forth in SEQ ID NO:35, SEQ ID NO:206, SEQ ID NO:193, SEQ ID NO:169, SEQ ID NO:158, or SEQ ID NO:63, respectively.

[0087] For example, the alignment in FIG. 4 provides the amino acid sequences of cDNA ID 23360114 (SEQ ID NO:35), CeresClone: 1382382 (SEQ ID NO:36), CeresClone: 1561543 (SEQ ID NO:37), gi|51964362 (SEQ ID NO:38), CeresClone:557109 (SEQ ID NO:39), gi|50912679 (SEQ ID NO:40), gi|51535177 (SEQ ID NO:41), and CeresClone:888753 (SEQ ID NO:42).

[0088] The alignment in FIG. 21 provides the amino acid sequences of cDNA ID 23388445 (SEQ ID NO:206), CeresClone:538877 (SEQ ID NO:212), gi|50907243 (SEQ ID NO:213), CeresClone:260992 (SEQ ID NO:214), and CeresClone:634320 (SEQ ID NO:215). Other homologs and/or orthologs of SEQ ID NO:206 include gi|21618279 (SEQ ID NO:207), CeresClone:3542 (SEQ ID NO:208), CeresClone:29363 (SEQ ID NO:209), gi|23198042 (SEQ ID NO:210), and CeresClone: 1104497 (SEQ ID NO:211).

[0089] The alignment in FIG. 19 provides the amino acid sequences of cDNA ID 24365511 (5110E8; SEQ ID NO:193) and gi|52076911 (SEQ ID NO:194).

[0090] The alignment in FIG. 16 provides the amino acid sequences of cDNA ID 23472397 (SEQ ID NO:169), CeresClone:554743 (SEQ ID NO:170), CeresClone:1623097 (SEQ ID NO:171), gi|3341468 (SEQ ID NO:172), CeresClone:1120474 (SEQ ID NO:173), CeresClone:729860 (SEQ ID NO:174), and gi|37051131 (SEQ ID NO:175).

[0091] The alignment in FIG. 15 provides the amino acid sequences of cDNA ID 23427553 (SEQ ID NO:158), CeresClone:956457 (SEQ ID NO:159), CeresClone: 1172789 (SEQ ID NO:160), CeresClone:480785 (SEQ ID NO:161), CeresClone:859154 (SEQ ID NO:162), CeresClone:407007 (SEQ ID NO:163), gill 3936312 (SEQ ID NO:164), CeresClone:283597 (SEQ ID NO:165), CeresClone:443626 (SEQ ID NO:166), and gi|13936314 (SEQ ID NO:167).

[0092] The alignment in FIG. 6 provides the amino acid sequences of cDNA ID 23371050 (SEQ ID NO:63), CeresClone:962327 (SEQ ID NO:64), CeresClone:1101577 (SEQ ID NO:65), CeresClone:634261 (SEQ ID NO:66), gi|5031281 (SEQ ID NO:67), gi|35187687 (SEQ ID NO:68), gi|34978689 (SEQ ID NO:69), and gi|34909836 (SEQ ID NO:70).

[0093] In some cases, a regulatory protein can include a polypeptide having at least 80% sequence identity, e.g., 80%, 85%, 90%, 93%, 95%, 97%, 98%, or 99% sequence identity, to an amino acid sequence corresponding to any of SEQ ID NOs:36-42, SEQ ID NOs:207-215, SEQ ID NO:194, SEQ ID NOs:170-175, SEQ ID NOs:159-167, SEQ ID NOs:64-70, or the consensus sequence set forth in FIG. 4, FIG. 21, FIG. 19, FIG. 16, FIG. 15, or FIG. 6.

[0094] A regulatory protein can contain a myb-like DNA-binding domain characteristic of myb-like transcription factor polypeptides. The retroviral oncogene v-myb and its cellular counterpart c-myb encode nuclear DNA-binding proteins. These proteins belong to the SANT domain family that specifically recognize the sequence YAAC(G/T)G. In myb, one of the most conserved regions consisting of three tandem repeats has been shown to be involved in DNA-binding. SEQ ID NO:198 and SEQ ID NO:200 set forth the amino acid sequences of DNA clones, identified herein as cDNA ID 23462512 (SEQ ID NO:197) and cDNA ID 23377122 (SEQ ID NO:199), respectively, that are predicted to encode myb-like transcription factor polypeptides.

[0095] A regulatory protein can comprise the amino acid sequence set forth in SEQ ID NO:198 or SEQ ID NO:200. Alternatively, a regulatory protein can be a homolog, ortholog, or variant of the polypeptide having the amino acid sequence set forth in SEQ ID NO:198 or SEQ ID NO:200. For example, a regulatory protein can have an amino acid sequence with at least 35% sequence identity, e.g., 36%, 39%, 41%, 45%, 47%, 48%, 49%, 50%, 51%, 52%, 56%, 57%, 60%, 61%, 62%, 63%, 64%, 65%, 67%, 68%, 70%, 75%, 80%, 85%, 90%, 95%, 97%, 98%, or 99% sequence identity, to the amino acid sequence set forth in SEQ ID NO:198 or SEQ ID NO:200.

[0096] Amino acid sequences of homologs and/or orthologs of the polypeptide having the amino acid sequence set forth in SEQ ID NO:200 are provided in FIG. 20. FIG. 20 also includes a consensus amino acid sequence determined by aligning homologous and/or orthologous amino acid sequences with the amino acid sequence set forth in SEQ ID NO:200.

[0097] For example, the alignment in FIG. 20 provides the amino acid sequences of cDNA ID 23377122 (SEQ ID NO:200), CeresClone:467905 (SEQ ID NO:201), gi|50907599 (SEQ ID NO:202), CeresClone:826195 (SEQ ID NO:203), and CeresClone:450772 (SEQ ID NO:204).

[0098] In some cases, a regulatory protein can include a polypeptide having at least 80% sequence identity, e.g., 80%, 85%, 90%, 93%, 95%, 97%, 98%, or 99% sequence identity, to an amino acid sequence corresponding to SEQ ID NO:201, SEQ ID NO:202, SEQ ID NO:203, SEQ ID NO:204, or the consensus sequence set forth in FIG. 20.

[0099] A regulatory protein can contain a WRKY DNA-binding domain characteristic of a WRKY plant transcription factor polypeptide. The WRKY domain is a 60 amino acid region that is defined by the conserved amino acid sequence WRKYGQK at its N-terminal end, together with a novel zinc finger-like motif. The WRKY domain is found in one or two copies in a superfamily of plant transcription factors involved in the regulation of various physiological programs that are unique to plants, including pathogen defense, senescence, trichome development and the biosynthesis of secondary metabolites. The WRKY domain binds specifically to the DNA sequence motif (T)(T)TGAC(C/T), which is known as the W box. The invariant TGAC core of the W box is essential for function and WRKY binding. Some proteins known to contain a WRKY domain include Arabidopsis thaliana ZAP1 (zinc-dependent activator protein-1); AtWRKY44/TTG2, a protein involved in trichome development and anthocyanin pigmentation; and wild oat ABF1-2, two proteins involved in the gibberellic acid-induced expression of the alpha-Amy2 gene. SEQ ID NO:196 sets forth the amino acid sequence of a DNA clone, identified herein as cDNA ID 23468313 (SEQ ID NO:195) that is predicted to encode a WRKY plant transcription factor polypeptide.

[0100] A regulatory protein can comprise the amino acid sequence set forth in SEQ ID NO:196. Alternatively, a regulatory protein can be a homolog, ortholog, or variant of the polypeptide having the amino acid sequence set forth in SEQ ID NO:196. For example, a regulatory protein can have an amino acid sequence with at least 35% sequence identity, e.g., 36%, 39%, 41%, 45%, 47%, 48%, 49%, 50%, 51%, 52%, 56%, 57%, 60%, 61%, 62%, 63%, 64%, 65%, 67%, 68%, 70%, 75%, 80%, 85%, 90%, 95%, 97%, 98%, or 99% sequence identity, to the amino acid sequence set forth in SEQ ID NO: 196.

[0101] A regulatory protein can have one or more domains characteristic of a basic-leucine zipper (bZIP) transcription factor polypeptide. For example, a regulatory protein can have a bZIP_{—}2 domain characteristic of a basic-leucine zipper (bZIP) transcription factor polypeptide. The basic-leucine zipper (bZIP) transcription factor polypeptides of eukaryotes contain a basic region mediating sequence-specific DNA-binding and a leucine zipper region that is required for dimerization. SEQ ID NO:221 sets forth the amino acid sequence of a DNA clone, identified herein as cDNA ID 23704869 (SEQ ID NO:220), that is predicted to encode a basic-leucine zipper (bZIP) transcription factor polypeptide.

[0102] In some cases, a regulatory protein can have a bZIP_Maf domain and an MFMR domain, both of which are characteristic of basic region leucine zipper (bZIP) domain-containing transcription factor polypeptides. The Maf family of basic region leucine zipper (bZIP) domain-containing transcription factor polypeptides may be related to bZIP_{—}1. An MFMR region is found in the N-terminus of the bZIP_{—}1 transcription factor domain. It is between 150 and 200 amino acids in length. The N-terminal half is rich in proline residues and has been termed the PRD (proline rich domain). The C-terminal half is more polar and has been called the MFMR (multifunctional mosaic region). It has been suggested that this family is composed of three sub-families called A, B and C, classified according to motif composition, and that some of these motifs may be involved in mediating protein-protein interactions. SEQ ID NO:177 sets forth the amino acid sequence of a DNA clone, identified herein as cDNA ID 23522373 (SEQ ID NO:176), that is predicted to encode a transcription factor polypeptide having a bZIP_Maf domain and an MFMR domain.

[0103] A regulatory protein can comprise the amino acid sequence set forth in SEQ ID NO:221 or SEQ ID NO:177. Alternatively, a regulatory protein can be a homolog, ortholog, or variant of the polypeptide having the amino acid sequence set forth in SEQ ID NO:221 or SEQ ID NO:177. For example, a regulatory protein can have an amino acid sequence with at least 40% sequence identity, e.g., 41%, 45%, 47%, 48%, 49%, 50%, 51%, 52%, 56%, 57%, 60%, 61%, 62%, 63%, 64%, 65%, 67%, 68%, 70%, 75%, 80%, 85%, 90%, 95%, 97%, 98%, or 99% sequence identity, to the amino acid sequence set forth in SEQ ID NO:221 or SEQ ID NO:177.

[0104] Amino acid sequences of homologs and/or orthologs of the polypeptide having the amino acid sequence set forth in SEQ ID NO:221 and SEQ ID NO:177 are provided in FIG. 22 and FIG. 17, respectively. Each of FIG. 22 and FIG. 17 also includes a consensus amino acid sequence determined by aligning homologous and/or orthologous amino acid sequences with the amino acid sequence set forth in SEQ ID NO:221 or SEQ ID NO:177.

[0105] For example, the alignment in FIG. 22 provides the amino acid sequences of cDNA ID 23704869 (SEQ ID NO:221), CeresClone:295738 (SEQ ID NO:224), gi|7489532 (SEQ ID NO:227), gi|1076760 (SEQ ID NO:233), gi|463212 (SEQ ID NO:235), and gi|21435101 (SEQ ID NO:236). Other homologs and/or orthologs of SEQ ID NO:221 include gi|16797791 (SEQ ID NO:222), gi|1806261 (SEQ ID NO:223), gi|168428 (SEQ ID NO:225), gi|1144536 (SEQ ID NO:226), gi|542187 (SEQ ID NO:228), gi|34897226 (SEQ ID NO:229), gi|4115746 (SEQ ID NO:230), gi|15865782 (SEQ ID NO:231), CeresClone:235570 (SEQ ID NO:232), and gi|1869928 (SEQ ID NO:234).

[0106] The alignment in FIG. 17 provides the amino acid sequences of cDNA ID 23522373 (5110H5; SEQ ID NO:177), gi|3608135 (SEQ ID NO:178), gi|3336903 (SEQ ID NO:180), CeresClone:545441 (SEQ ID NO:181), gi|5381313 (SEQ ID NO:182), gi|3336906 (SEQ ID NO:183), gi|13775109 (SEQ ID NO:184), gi|435942 (SEQ ID NO:185), and CeresClone:287677 (SEQ ID NO:188). Other homologs and/or orthologs of SEQ ID NO:177 include CeresClone:1188156 (SEQ ID NO:179), CeresClone:523155 (SEQ ID NO:186), and gi|13775107 (SEQ ID NO:187).

[0107] In some cases, a regulatory protein can include a polypeptide having at least 80% sequence identity, e.g., 80%, 85%, 90%, 93%, 95%, 97%, 98%, or 99% sequence identity, to an amino acid sequence corresponding to any of SEQ ID NOs:222-236, SEQ ID NOs:178-188, or the consensus sequence set forth in FIG. 22 or FIG. 17.

[0108] A regulatory protein can have an HTH_{—}3 domain characteristic of helix-turn helix DNA binding polypeptides. The large family of DNA binding helix-turn helix proteins includes a bacterial plasmid copy control protein, bacterial methylases, various bacteriophage transcription control proteins, and a vegetative specific protein from Dictyostelium discoideum. SEQ ID NO:88 sets forth the amino acid sequence of a DNA clone, identified herein as cDNA ID 23385649 (SEQ ID NO:87), that is predicted to encode a helix-turn helix DNA-binding polypeptide.

[0109] A regulatory protein can comprise the amino acid sequence set forth in SEQ ID NO:88. Alternatively, a regulatory protein can be a homolog, ortholog, or variant of the polypeptide having the amino acid sequence set forth in SEQ ID NO:88. For example, a regulatory protein can have an amino acid sequence with at least 45% sequence identity, e.g., 45%, 50%, 55%, 60%, 65%, 70%, 75%, 80%, 85%, 90%, 95%, 97%, 98%, or 99% sequence identity, to the amino acid sequence set forth in SEQ ID NO:88.

[0110] Amino acid sequences of homologs and/or orthologs of the polypeptide having the amino acid sequence set forth in SEQ ID NO:88 are provided in FIG. 9. FIG. 9 also includes a consensus amino acid sequence determined by aligning homologous and/or orthologous amino acid sequences with the amino acid sequence set forth in SEQ ID NO:88.

[0111] For example, the alignment in FIG. 9 provides the amino acid sequences of cDNA ID 23385649 (SEQ ID NO:88), CeresClone:474636 (SEQ ID NO:89), CeresClone: 1057375 (SEQ ID NO:90), CeresClone: 1027534 (SEQ ID NO:91), gi|1632831 (SEQ ID NO:92), gi|5669634 (SEQ ID NO:93), gi|8895787 (SEQ ID NO:94), CeresClone:638899 (SEQ ID NO:95), CeresClone:348434 (SEQ ID NO:96), CeresClone:1607224 (SEQ ID NO:97), gi|0725389 (SEQ ID NO:98), and gi|19225065 (SEQ ID NO:99).

[0112] In some cases, a regulatory protein can include a polypeptide having at least 80% sequence identity, e.g., 80%, 85%, 90%, 93%, 95%, 97%, 98%, or 99% sequence identity, to an amino acid sequence corresponding to any of SEQ ID NOs:89-99 or the consensus sequence set forth in FIG. 9.

[0113] A regulatory protein can have an HMG (high mobility group) box characteristic of a high mobility group (HMG or HMGB) protein. High mobility group (HMG or HMGB) proteins are a family of relatively low molecular weight non-histone components in chromatin. HMG1 and HMG2 bind single-stranded DNA preferentially and unwind double-stranded DNA. Although they have no sequence specificity, HMG1 and HMG2 have a high affinity for bent or distorted DNA. HMG1 and HMG2 contain two DNA-binding HMG-box domains (A and B) and a long acidic C-terminal domain rich in aspartic and glutamic acid residues. The acidic tail modulates the affinity of the tandem HMG boxes in HMG1 and 2 for a variety of DNA targets. HMG1 and 2 appear to play important architectural roles in the assembly of nucleoprotein complexes in a variety of biological processes, for example the initiation of transcription and DNA repair. In addition to the HMG1 and HMG2 proteins, HMG domains occur in single or multiple copies in the following protein classes: the SOX family of transcription factors; SRY sex determining region Y protein and related proteins; LEF1 lymphoid enhancer binding factor 1; SSRP recombination signal recognition protein; MTF1 mitochondrial transcription factor 1; UBF1/2 nucleolar transcription factors; Abf2 yeast ARS-binding factor; and Saccharomyces cerevisiae transcription factors Ixr1, Rox1, Nhp6a, Nhp6b and Spp41. SEQ ID NO:18 sets forth the amino acid sequence of a DNA clone, identified herein as cDNA ID 23358452 (SEQ ID NO:17), that is predicted to encode an HMG box-containing polypeptide.

[0114] A regulatory protein can comprise the amino acid sequence set forth in SEQ ID NO:18. Alternatively, a regulatory protein can be a homolog, ortholog, or variant of the polypeptide having the amino acid sequence set forth in SEQ ID NO:18. For example, a regulatory protein can have an amino acid sequence with at least 40% sequence identity, e.g., 40%, 45%, 50%, 55%, 60%, 65%, 70%, 75%, 80%, 85%, 90%, 95%, 97%, 98%, or 99% sequence identity, to the amino acid sequence set forth in SEQ ID NO:18.

[0115] Amino acid sequences of homologs and/or orthologs of the polypeptide having the amino acid sequence set forth in SEQ ID NO:18 are provided in FIG. 3. FIG. 3 also includes a consensus amino acid sequence determined by aligning homologous and/or orthologous amino acid sequences with the amino acid sequence set forth in SEQ ID NO:18.

[0116] For example, the alignment in FIG. 3 provides the amino acid sequences of cDNA ID 23358452 (SEQ ID NO:18), CeresClone:873113 (SEQ ID NO:19), CeresClone:956177 (SEQ ID NO:20), CeresClone:721511 (SEQ ID NO:21), CeresClone:641329 (SEQ ID NO:22), CeresClone:782784 (SEQ ID NO:23), gill 8645 (SEQ ID NO:24), gi|1052956 (SEQ ID NO:25), gi|436424 (SEQ ID NO:26), gi|2894109 (SEQ ID NO:27), CeresClone:686294 (SEQ ID NO:28), gi|50726318 (SEQ ID NO:29), gi|729737 (SEQ ID NO:30), gi|729736 (SEQ ID NO:31), CeresClone:1060767 (SEQ ID NO:32), and gi|7446231 (SEQ ID NO:33).

[0117] In some cases, a regulatory protein can include a polypeptide having at least 80% sequence identity, e.g., 80%, 85%, 90%, 93%, 95%, 97%, 98%, or 99% sequence identity, to an amino acid sequence corresponding to any of SEQ ID NOs:19-33 or the consensus sequence set forth in FIG. 3.

[0118] A regulatory protein can contain a GASA domain characteristic of a polypeptide belonging to the GASA gibberellin regulated cysteine rich protein family. The expression of these proteins is up-regulated by the plant hormone gibberellin. Most of these gibberellin regulated proteins have a role in plant development. There are 12 conserved cysteine residues, making it possible for these proteins to posses six disulphide bonds. SEQ ID NO:44 sets forth the amino acid sequence of a DNA clone, identified herein as cDNA ID 23366941 (SEQ ID NO:43), that is predicted to encode a gibberellin regulated polypeptide.

[0119] A regulatory protein can comprise the amino acid sequence set forth in SEQ ID NO:44. Alternatively, a regulatory protein can be a homolog, ortholog, or variant of the polypeptide having the amino acid sequence set forth in SEQ ID NO:44. For example, a regulatory protein can have an amino acid sequence with at least 50% sequence identity, e.g., 50%, 55%, 60%, 65%, 70%, 75%, 80%, 85%, 90%, 95%, 97%, 98%, or 99% sequence identity, to the amino acid sequence set forth in SEQ ID NO:44.

[0120] Amino acid sequences of homologs and/or orthologs of the polypeptide having the amino acid sequence set forth in SEQ ID NO:44 are provided in FIG. 5. FIG. 5 also includes a consensus amino acid sequence determined by aligning homologous and/or orthologous amino acid sequences with the amino acid sequence set forth in SEQ ID NO:44.

[0121] For example, the alignment in FIG. 5 provides the amino acid sequences of cDNA ID 23366941 (SEQ ID NO:44), gi|12324817 (SEQ ID NO:45), gi|55584076 (SEQ ID NO:46), CeresClone:303971 (SEQ ID NO:47), gi|16516825 (SEQ ID NO:50), CeresClone:1000657 (SEQ ID NO:52), gi|16516823 (SEQ ID NO:53), gi|2982285 (SEQ ID NO:54), CeresClone:963426 (SEQ ID NO:55), CeresClone:682557 (SEQ ID NO:56), gi|59042581 (SEQ ID NO:58), CeresClone:602368 (SEQ ID NO:59), and CeresClone:1114184 (SEQ ID NO:61). Other homologs and/or orthologs of SEQ ID NO:44 include CeresClone:1633647 (SEQ ID NO:48), CeresClone:314456 (SEQ ID NO:49), CeresClone:780025 (SEQ ID NO:51), CeresClone:646744 (SEQ ID NO:57), and CeresClone:566082 (SEQ ID NO:60).

[0122] In some cases, a regulatory protein can include a polypeptide having at least 80% sequence identity, e.g., 80%, 85%, 90%, 93%, 95%, 97%, 98%, or 99% sequence identity, to an amino acid sequence corresponding to any of SEQ ID NOs:45-61 or the consensus sequence set forth in FIG. 5.

[0123] A regulatory protein can contain a GRP domain characteristic of a polypeptide belonging to the glycine-rich protein family. This family of proteins includes several glycine-rich proteins as well as two nodulins 16 and 24. The family also contains proteins that are induced in response to various stresses. Some of the proteins that have a glycine-rich domain (i.e., GRPs) are capable of binding to RNA, potentially affecting the stability and translatability of bound RNAs. SEQ ID NO:115 sets forth the amino acid sequence of a DNA clone, identified herein as cDNA ID 23387900 (SEQ ID NO:114), that is predicted to encode a glycine-rich protein. SEQ ID NO:72 sets forth the amino acid sequence of a DNA clone, identified herein as cDNA ID 23383878 (SEQ ID NO:71), that is predicted to encode a glycine-rich RNA-binding protein.

[0124] A regulatory protein can comprise the amino acid sequence set forth in SEQ ID NO:115 or SEQ ID NO:72. Alternatively, a regulatory protein can be a homolog, ortholog, or variant of the polypeptide having the amino acid sequence set forth in SEQ ID NO:115 or SEQ ID NO:72. For example, a regulatory protein can have an amino acid sequence with at least 75% sequence identity, e.g., 75%, 80%, 85%, 90%, 95%, 97%, 98%, or 99% sequence identity, to the amino acid sequence set forth in SEQ ID NO:115 or SEQ ID NO:72.

[0125] Amino acid sequences of homologs and/or orthologs of the polypeptide having the amino acid sequence set forth in SEQ ID NO:115 and SEQ ID NO:72 are provided in FIG. 11 and FIG. 7, respectively. Each of FIG. 11 and FIG. 7 also includes a consensus amino acid sequence determined by aligning homologous and/or orthologous amino acid sequences with the amino acid sequence set forth in SEQ ID NO:115 or SEQ ID NO:72.

[0126] For example, the alignment in FIG. 11 provides the amino acid sequences of cDNA ID 23387900 (SEQ ID NO:115), CeresClone:118184 (SEQ ID NO:116), CeresClone:118878 (SEQ ID NO:117), CeresClone:3929 (SEQ ID NO:118), CeresClone: 12459 (SEQ ID NO:119), CeresClone: 1354021 (SEQ ID NO:120), gi|30017217 (SEQ ID NO:121), and CeresClone:109026 (SEQ ID NO:122).

[0127] The alignment in FIG. 7 provides the amino acid sequences of cDNA ID 23383878 (SEQ ID NO:72), CeresClone:94850 (SEQ ID NO:73), gi|21689807 (SEQ ID NO:74), gi|18391322 (SEQ ID NO:75), CeresClone: 17426 (SEQ ID NO:76), CeresClone: 11593 (SEQ ID NO:77), CeresClone: 1087844 (SEQ ID NO:78), and CeresClone:963628 (SEQ ID NO:79).

[0128] In some cases, a regulatory protein can include a polypeptide having at least 80% sequence identity, e.g., 80%, 85%, 90%, 93%, 95%, 97%, 98%, or 99% sequence identity, to an amino acid sequence corresponding to any of SEQ ID NOs:116-122, SEQ ID NOs:73-79, or the consensus sequence set forth in FIG. 11 or FIG. 7.

[0129] A regulatory protein can contain an RRM_{—}1 domain characteristic of an RNA binding polypeptide. RNA recognition motifs (also known as RRM, RBD, or RNP domains) are found in a variety of RNA binding polypeptides, including heterogeneous nuclear ribonucleoproteins (hnRNPs), polypeptides implicated in regulation of alternative splicing, and polypeptide components of small nuclear ribonucleoproteins (snRNPs). The RRM motif also appears in a few single stranded DNA binding proteins. The RRM structure consists of four strands and two helices arranged in an alpha/beta sandwich, with a third helix present during RNA binding in some cases. SEQ ID NO:7 sets forth the amino acid sequence of a DNA clone, identified herein as cDNA ID 23357249 (SEQ ID NO:6), that is predicted to encode an RNA binding polypeptide.

[0130] A regulatory protein can comprise the amino acid sequence set forth in SEQ ID NO:7. Alternatively, a regulatory protein can be a homolog, ortholog, or variant of the polypeptide having the amino acid sequence set forth in SEQ ID NO:7. For example, a regulatory protein can have an amino acid sequence with at least 50% sequence identity, e.g., 50%, 55%, 60%, 65%, 70%, 75%, 80%, 85%, 90%, 95%, 97%, 98%, or 99% sequence identity, to the amino acid sequence set forth in SEQ ID NO:7.

[0131] Amino acid sequences of homologs and/or orthologs of the polypeptide having the amino acid sequence set forth in SEQ ID NO:7 are provided in FIG. 2. FIG. 2 also includes a consensus amino acid sequence determined by aligning homologous and/or orthologous amino acid sequences with the amino acid sequence set forth in SEQ ID NO:7.

[0132] For example, the alignment in FIG. 2 provides the amino acid sequences of cDNA ID 23357249 (SEQ ID NO:7), CeresClone:1388283 (SEQ ID NO:8), gi|1778374 (SEQ ID NO:9), gi|7439995 (SEQ ID NO:10), gi|7489099 (SEQ ID NO:11), gi|34906972 (SEQ ID NO:12), CeresClone:536457 (SEQ ID NO:13), CeresClone:744170 (SEQ ID NO:14), CeresClone:579861 (SEQ ID NO:15), and gi|21388662 (SEQ ID NO:16).

[0133] In some cases, a regulatory protein can include a polypeptide having at least 80% sequence identity, e.g., 80%, 85%, 90%, 93%, 95%, 97%, 98%, or 99% sequence identity, to an amino acid sequence corresponding to any of SEQ ID NOs:8-16 or the consensus sequence set forth in FIG. 2.

[0134] A regulatory protein can contain a Mov34 domain characteristic of a Mov34/MPN/PAD-1 family polypeptide. Mov34 polypeptides are reported to act as regulatory subunits of the 26 proteasome, which is involved in the ATP-dependent degradation of ubiquitinated proteins. Mov34 domains are found in the N-terminus of the proteasome regulatory subunits, eukaryotic initiation factor 3 (eIF3) subunits, and regulators of transcription factors. SEQ ID NO:81 sets forth the amino acid sequence of a DNA clone, identified herein as cDNA ID 23385144 (SEQ ID NO:80), that is predicted to encode a Mov34/MPN/PAD-1 family polypeptide.

[0135] A regulatory protein can comprise the amino acid sequence set forth in SEQ ID NO:81. Alternatively, a regulatory protein can be a homolog, ortholog, or variant of the polypeptide having the amino acid sequence set forth in SEQ ID NO:81. For example, a regulatory protein can have an amino acid sequence with at least 60% sequence identity, e.g., 60%, 65%, 70%, 75%, 80%, 85%, 90%, 95%, 97%, 98%, or 99% sequence identity, to the amino acid sequence set forth in SEQ ID NO:81.

[0136] Amino acid sequences of homologs and/or orthologs of the polypeptide having the amino acid sequence set forth in SEQ ID NO:81 are provided in FIG. 8. FIG. 8 also includes a consensus amino acid sequence determined by aligning homologous and/or orthologous amino acid sequences with the amino acid sequence set forth in SEQ ID NO:81. For example, the alignment in FIG. 8 provides the amino acid sequences of cDNA ID 23385144 (SEQ ID NO:81), CeresClone:473126 (SEQ ID NO:82), gi|54287494 (SEQ ID NO:83), and CeresClone:238614 (SEQ ID NO:84). Other homologs and/or orthologs of SEQ ID NO:81 include gi|34903124 (SEQ ID NO:85) and gi|53791918 (SEQ ID NO:86).

[0137] In some cases, a regulatory protein can include a polypeptide having at least 80% sequence identity, e.g., 80%, 85%, 90%, 93%, 95%, 97%, 98%, or 99% sequence identity, to an amino acid sequence corresponding to any of SEQ ID NOs:82-86 or the consensus sequence set forth in FIG. 8.

[0138] A regulatory protein can contain an NUC130/3NT domain and an SDA1 domain. An NUC130/3NT domain is an N-terminal domain found in a novel nucleolar protein family. An SDA1 domain characterizes a family consisting of several SDA1 protein homologues. SDA1 is a Saccharomyces cerevisiae protein which is involved in the control of the actin cytoskeleton, is essential for cell viability, and is localized in the nucleus. SEQ ID NO:190 sets forth the amino acid sequence of a DNA clone, identified herein as cDNA ID 23655935 (SEQ ID NO:189), that is predicted to encode a polypeptide having an NUC130/3NT domain and an SDA1 domain.

[0139] A regulatory protein can comprise the amino acid sequence set forth in SEQ ID NO:190. Alternatively, a regulatory protein can be a homolog, ortholog, or variant of the polypeptide having the amino acid sequence set forth in SEQ ID NO:190. For example, a regulatory protein can have an amino acid sequence with at least 50% sequence identity, e.g., 50%, 55%, 60%, 65%, 70%, 75%, 80%, 85%, 90%, 95%, 97%, 98%, or 99% sequence identity, to the amino acid sequence set forth in SEQ ID NO:190.

[0140] The amino acid sequence of a homolog of the polypeptide having the amino acid sequence set forth in SEQ ID NO:190 is provided in FIG. 18. FIG. 18 also includes a consensus amino acid sequence determined by aligning the homologous amino acid sequence with the amino acid sequence set forth in SEQ ID NO:190. For example, the alignment in FIG. 18 provides the amino acid sequences of cDNA ID 23655935 (5110C8; SEQ ID NO:190) and gi|50928937 (SEQ ID NO:191).

[0141] In some cases, a regulatory protein can include a polypeptide having at least 80% sequence identity, e.g., 80%, 85%, 90%, 93%, 95%, 97%, 98%, or 99% sequence identity, to an amino acid sequence corresponding to SEQ ID NO: 191 or the consensus sequence set forth in FIG. 18.

[0142] A regulatory protein encoded by a recombinant nucleic acid can be a native regulatory protein, i.e., one or more additional copies of the coding sequence for a regulatory protein that is naturally present in the cell. Alternatively, a regulatory protein can be heterologous to the cell, e.g., a transgenic Papaveraceae plant can contain the coding sequence for a transcription factor polypeptide from a Catharanthus plant.

[0143] A regulatory protein can include additional amino acids that are not involved in modulating gene expression, and thus can be longer than would otherwise be the case. For example, a regulatory protein can include an amino acid sequence that functions as a reporter. Such a regulatory protein can be a fusion protein in which a green fluorescent protein (GFP) polypeptide is fused to, e.g., SEQ ID NO:7, or in which a yellow fluorescent protein (YFP) polypeptide is fused to, e.g., SEQ ID NO:35. In some embodiments, a regulatory protein includes a purification tag, a chloroplast transit peptide, a mitochondrial transit peptide, or a leader sequence added to the amino or carboxy terminus.

[0144] Regulatory protein candidates suitable for use in the invention can be identified by analysis of nucleotide and polypeptide sequence alignments. For example, performing a query on a database of nucleotide or polypeptide sequences can identify homologs and/or orthologs of regulatory proteins. Sequence analysis can involve BLAST, Reciprocal BLAST, or PSI-BLAST analysis of nonredundant databases using known regulatory protein amino acid sequences. Those polypeptides in the database that have greater than 40% sequence identity can be identified as candidates for further evaluation for suitability as regulatory proteins. Amino acid sequence similarity allows for conservative amino acid substitutions, such as substitution of one hydrophobic residue for another or substitution of one polar residue for another. If desired, manual inspection of such candidates can be carried out in order to narrow the number of candidates to be further evaluated. Manual inspection can be performed by selecting those candidates that appear to have domains suspected of being present in regulatory proteins, e.g., conserved functional domains.

[0145] The identification of conserved regions in a template or subject polypeptide can facilitate production of variants of regulatory proteins. Conserved regions can be identified by locating a region within the primary amino acid sequence of a template polypeptide that is a repeated sequence, forms some secondary structure (e.g., helices and beta sheets), establishes positively or negatively charged domains, or represents a protein motif or domain. See, e.g., the Pfam web site describing consensus sequences for a variety of protein motifs and domains at sanger.ac.uk/Pfam and genome.wustl.edu/Pfam. A description of the information included at the Pfam database is described in Sonnhammer et al., Nucl. Acids Res., 26:320-322 (1998); Sonnhammer et al., Proteins, 28:405-420 (1997); and Bateman et al., Nucl. Acids Res., 27:260-262 (1999).

[0146] Conserved regions also can be determined by aligning sequences of the same or related polypeptides from closely related species. Closely related species preferably are from the same family. In some embodiments, alignment of sequences from two different species is adequate. For example, sequences from Arabidopsis and Zea mays can be used to identify one or more conserved regions.

[0147] Typically, polypeptides that exhibit at least about 40% amino acid sequence identity are useful to identify conserved regions. Conserved regions of related polypeptides can exhibit at least 45% amino acid sequence identity, e.g., at least 50%, at least 60%, at least 70%, at least 80%, or at least 90% amino acid sequence identity. In some embodiments, a conserved region of target and template polypeptides exhibit at least 92%, 94%, 96%, 98%, or 99% amino acid sequence identity. Amino acid sequence identity can be deduced from amino acid or nucleotide sequences. In certain cases, highly conserved domains have been identified within regulatory proteins. These conserved regions can be useful in identifying functionally similar (orthologous) regulatory proteins.

[0148] In some instances, suitable regulatory proteins can be synthesized on the basis of consensus functional domains and/or conserved regions in polypeptides that are homologous regulatory proteins. Domains are groups of substantially contiguous amino acids in a polypeptide that can be used to characterize protein families and/or parts of proteins. Such domains have a “fingerprint” or “signature” that can comprise conserved (1) primary sequence, (2) secondary structure, and/or (3) three-dimensional conformation. Generally, domains are correlated with specific in vitro and/or in vivo activities. A domain can have a length of from 10 amino acids to 400 amino acids, e.g., 10 to 50 amino acids, or 25 to 100 amino acids, or 35 to 65 amino acids, or 35 to 55 amino acids, or 45 to 60 amino acids, or 200 to 300 amino acids, or 300 to 400 amino acids.

[0149] Representative homologs and/or orthologs of regulatory proteins are shown in FIGS. 1-22. Each Figure represents an alignment of the amino acid sequence of a regulatory protein with the amino acid sequences of corresponding homologs and/or orthologs. Amino acid sequences of regulatory proteins and their corresponding homologs and/or orthologs have been aligned to identify conserved amino acids and to determine consensus sequences that contain frequently occurring amino acid residues at particular positions in the aligned sequences, as shown in FIGS. 1-22. A dash in an aligned sequence represents a gap, i.e., a lack of an amino acid at that position. Identical amino acids or conserved amino acid substitutions among aligned sequences are identified by boxes.

[0150] Each consensus sequence is comprised of conserved regions. Each conserved region contains a sequence of contiguous amino acid residues. A dash in a consensus sequence indicates that the consensus sequence either lacks an amino acid at that position or includes an amino acid at that position. If an amino acid is present, the residue at that position corresponds to one found in any aligned sequence at that position.

[0151] Useful polypeptides can be constructed based on the consensus sequence in FIG. 1, FIG. 2, FIG. 3, FIG. 4, FIG. 5, FIG. 6, FIG. 7, FIG. 8, FIG. 9, FIG. 10, FIG. 11, FIG. 12, FIG. 13, FIG. 14, FIG. 15, FIG. 16, FIG. 17, FIG. 18, FIG. 19, FIG. 20, FIG. 21, or FIG. 22. Such a polypeptide includes the conserved regions in the selected consensus sequence, arranged in the order depicted in the Figure from amino-terminal end to carboxy-terminal end. Such a polypeptide may also include zero, one, or more than one amino acid in positions marked by dashes. When no amino acids are present at positions marked by dashes, the length of such a polypeptide is the sum of the amino acid residues in all conserved regions. When amino acids are present at all positions marked by dashes, such a polypeptide has a length that is the sum of the amino acid residues in all conserved regions and all dashes.

[0152] A conserved domain in certain cases may be 1) a localization domain, 2) an activation domain, 3) a repression domain, 4) an oligomerization domain or 5) a DNA binding domain. Consensus domains and conserved regions can be identified by homologous polypeptide sequence analysis as described above. The suitability of polypeptides for use as regulatory proteins can be evaluated by functional complementation studies.

[0153] Alternatively, a regulatory protein can be a fragment of a naturally occurring regulatory protein. In certain cases, such as transcription factor regulatory proteins, a fragment can comprise the DNA-binding and transcription-regulating domains of the naturally occurring regulatory protein.

[0154] Additional information on regulatory protein domains is provided below.

DNA Binding Domain

[0155] A regulatory protein can include a domain, termed a DNA binding domain, which binds to a recognized site on DNA. A DNA binding domain of a regulatory protein can bind to one or more specific cis-responsive promoter motifs described herein. The typical result is modulation of transcription from a transcriptional start site associated with and operably linked to the cis-responsive motif. In some embodiments, binding of a DNA binding domain to a cis-responsive motif in planta involves other cellular components, which can be supplied by the plant.

Transactivation Domain

[0156] A regulatory protein can have discrete DNA binding and transactivation domains. Typically, transactivation domains bring proteins of the cellular transcription and translation machinery into contact with the transcription start site to initiate transcription. A transactivation domain of a regulatory protein can be synthetic or can be naturally-occurring. An example of a transactivation domain is the transactivation domain of a maize transcription factor C polypeptide.

Oligomerization Sequences

[0157] In some embodiments, a regulatory protein comprises oligomerization sequences. In some instances oligomerization is required for a ligand/regulatory protein complex or protein/protein complex to bind to a recognized DNA site. Oligomerization sequences can permit a regulatory protein to produce either homo- or heterodimers. Several motifs or domains in the amino acid sequence of a regulatory protein can influence heterodimerization or homodimerization of a given regulatory protein.

[0158] In some embodiments, transgenic plants also include a recombinant coactivator polypeptide that can interact with a regulatory protein to mediate the regulatory protein's effect on transcription of an endogenous gene. Such polypeptides include chaperonins. In some embodiments, a recombinant coactivator polypeptide is a chimera of a non-plant coactivator polypeptide and a plant coactivator polypeptide. Thus, in some embodiments, a regulatory protein described herein binds as a heterodimer to a promoter motif. In such embodiments, plants and plant cells contain a coding sequence for a second or other regulatory protein as a dimerization or multimerization partner, in addition to the coding sequence for the first regulatory protein.

Nucleic Acids

[0159] A nucleic acid can comprise a coding sequence that encodes any of the regulatory proteins as set forth in SEQ ID NOs:2-5, SEQ ID NOs:7-16, SEQ ID NOs:18-33, SEQ ID NOs:35-42, SEQ ID NOs:44-61, SEQ ID NOs:63-70, SEQ ID NOs:72-79, SEQ ID NOs:81-86, SEQ ID NOs:88-99, SEQ ID NOs:101-113, SEQ ID NOs:115-122, SEQ ID NOs:124-136, SEQ ID NOs:138-150, SEQ ID NOs:152-156, SEQ ID NOs:158-167, SEQ ID NOs:169-175, SEQ ID NOs:177-188, SEQ ID NOs:190-191, SEQ ID NOs:193-194, SEQ ID NO:196, SEQ ID NO:198, SEQ ID NOs:200-204, SEQ ID NOs:206-215, SEQ ID NO:217, SEQ ID NO:219, SEQ ID NOs:221-236, and the consensus sequences set forth in FIGS. 1-22. In some cases, a recombinant nucleic acid construct can include a nucleic acid comprising less than the full-length coding sequence of a regulatory protein. In some cases, a recombinant nucleic acid construct can include a nucleic acid comprising a coding sequence, a gene, or a fragment of a coding sequence or gene in an antisense orientation so that the antisense strand of RNA is transcribed.

[0160] It will be appreciated that a number of nucleic acids can encode a polypeptide having a particular amino acid sequence. The degeneracy of the genetic code is well known to the art; i.e., for many amino acids, there is more than one nucleotide triplet that serves as the codon for the amino acid. For example, codons in the coding sequence for a given regulatory protein can be modified such that optimal expression in a particular plant species is obtained, using appropriate codon bias tables for that species.

[0161] A nucleic acid also can comprise a nucleotide sequence corresponding to any of the regulatory regions as set forth in SEQ ID NOs:237-330 and SEQ ID NOs:365-371. In some cases, a nucleic acid can comprise a nucleotide sequence corresponding to any of the regulatory regions as set forth in SEQ ID NOs:237-330 and SEQ ID NOs:365-371 and a coding sequence that encodes any of the regulatory proteins as set forth in SEQ ID NOs:2-5, SEQ ID NOs:7-16, SEQ ID NOs:18-33, SEQ ID NOs:35-42, SEQ ID NOs:44-61, SEQ ID NOs:63-70, SEQ ID NOs:72-79, SEQ ID NOs:81-86, SEQ ID NOs:88-99, SEQ ID NOs:101-113, SEQ ID NOs:115-122, SEQ ID NOs:124-136, SEQ ID NOs:138-150, SEQ ID NOs:152-156, SEQ ID NOs:158-167, SEQ ID NOs:169-175, SEQ ID NOs:177-188, SEQ ID NOs:190-191, SEQ ID NOs:193-194, SEQ ID NO:196, SEQ ID NO:198, SEQ ID NOs:200-204, SEQ ID NOs:206-215, SEQ ID NO:217, SEQ ID NO:219, SEQ ID NOs:221-236, and the consensus sequences set forth in FIGS. 1-22.

[0162] The terms “nucleic acid” and “polynucleotide” are used interchangeably herein, and refer both to RNA and DNA, including cDNA, genomic DNA, synthetic DNA, and DNA (or RNA) containing nucleic acid analogs. Polynucleotides can have any three-dimensional structure. A nucleic acid can be double-stranded or single-stranded (i.e., a sense strand or an antisense strand). Non-limiting examples of polynucleotides include genes, gene fragments, exons, introns, messenger RNA (mRNA), transfer RNA, ribosomal RNA, siRNA, micro-RNA, ribozymes, cDNA, recombinant polynucleotides, branched polynucleotides, plasmids, vectors, isolated DNA of any sequence, isolated RNA of any sequence, nucleic acid probes, and primers, as well as nucleic acid analogs.

[0163] An isolated nucleic acid can be, for example, a naturally-occurring DNA molecule, provided one of the nucleic acid sequences normally found immediately flanking that DNA molecule in a naturally-occurring genome is removed or absent. Thus, an isolated nucleic acid includes, without limitation, a DNA molecule that exists as a separate molecule, independent of other sequences (e.g., a chemically synthesized nucleic acid, or a cDNA or genomic DNA fragment produced by the polymerase chain reaction (PCR) or restriction endonuclease treatment). An isolated nucleic acid also refers to a DNA molecule that is incorporated into a vector, an autonomously replicating plasmid, a virus, or into the genomic DNA of a prokaryote or eukaryote. In addition, an isolated nucleic acid can include an engineered nucleic acid such as a DNA molecule that is part of a hybrid or fusion nucleic acid. A nucleic acid existing among hundreds to millions of other nucleic acids within, for example, cDNA libraries or genomic libraries, or gel slices containing a genomic DNA restriction digest, is not to be considered an isolated nucleic acid.

[0164] Isolated nucleic acid molecules can be produced by standard techniques. For example, polymerase chain reaction (PCR) techniques can be used to obtain an isolated nucleic acid containing a nucleotide sequence described herein. PCR can be used to amplify specific sequences from DNA as well as RNA, including sequences from total genomic DNA or total cellular RNA. Various PCR methods are described, for example, in PCR Primer: A Laboratory Manual, Dieffenbach and Dveksler, eds., Cold Spring Harbor Laboratory Press, 1995. Generally, sequence information from the ends of the region of interest or beyond is employed to design oligonucleotide primers that are identical or similar in sequence to opposite strands of the template to be amplified. Various PCR strategies also are available by which site-specific nucleotide sequence modifications can be introduced into a template nucleic acid. Isolated nucleic acids also can be chemically synthesized, either as a single nucleic acid molecule (e.g., using automated DNA synthesis in the 3′ to 5′ direction using phosphoramidite technology) or as a series of oligonucleotides. For example, one or more pairs of long oligonucleotides (e.g., >100 nucleotides) can be synthesized that contain the desired sequence, with each pair containing a short segment of complementarity (e.g., about 15 nucleotides) such that a duplex is formed when the oligonucleotide pair is annealed. DNA polymerase is used to extend the oligonucleotides, resulting in a single, double-stranded nucleic acid molecule per oligonucleotide pair, which then can be ligated into a vector. Isolated nucleic acids of the invention also can be obtained by mutagenesis of, e.g., a naturally occurring DNA.

[0165] As used herein, the term “percent sequence identity” refers to the degree of identity between any given query sequence and a subject sequence. A subject sequence typically has a length that is more than 80 percent, e.g., more than 82, 85, 87, 89, 90, 93, 95, 97, 99, 100, 105, 110, 115, or 120 percent, of the length of the query sequence. A query nucleic acid or amino acid sequence is aligned to one or more subject nucleic acid or amino acid sequences using the computer program ClustalW (version 1.83, default parameters), which allows alignments of nucleic acid or protein sequences to be carried out across their entire length (global alignment). Chenna et al., Nucleic Acids Res., 31(13):3497-500 (2003).

[0166] ClustalW calculates the best match between a query and one or more subject sequences, and aligns them so that identities, similarities and differences can be determined. Gaps of one or more residues can be inserted into a query sequence, a subject sequence, or both, to maximize sequence alignments. For fast pairwise alignment of nucleic acid sequences, the following default parameters are used: word size: 2; window size: 4; scoring method: percentage; number of top diagonals: 4; and gap penalty: 5. For multiple alignment of nucleic acid sequences, the following parameters are used: gap opening penalty: 10.0; gap extension penalty: 5.0; and weight transitions: yes. For fast pairwise alignment of protein sequences, the following parameters are used: word size: 1; window size: 5; scoring method: percentage; number of top diagonals: 5; gap penalty: 3. For multiple alignment of protein sequences, the following parameters are used: weight matrix: blosum; gap opening penalty: 10.0; gap extension penalty: 0.05; hydrophilic gaps: on; hydrophilic residues: Gly, Pro, Ser, Asn, Asp, Gln, Glu, Arg, and Lys; residue-specific gap penalties: on. The output is a sequence alignment that reflects the relationship between sequences. ClustalW can be run, for example, at the Baylor College of Medicine Search Launcher site (searchlauncher.bcm.tmc.edu/multi-align/multi-align.html) and at the European Bioinformatics Institute site on the World Wide Web (ebi.ac.uk/clustalw).

[0167] To determine a percent identity between a query sequence and a subject sequence, ClustalW divides the number of identities in the best alignment by the number of residues compared (gap positions are excluded), and multiplies the result by 100. The output is the percent identity of the subject sequence with respect to the query sequence. It is noted that the percent identity value can be rounded to the nearest tenth. For example, 78.11, 78.12, 78.13, and 78.14 are rounded down to 78.1, while 78.15, 78.16, 78.17, 78.18, and 78.19 are rounded up to 78.2.

[0168] The term “exogenous” with respect to a nucleic acid indicates that the nucleic acid is part of a recombinant nucleic acid construct, or is not in its natural environment. For example, an exogenous nucleic acid can be a sequence from one species introduced into another species, i.e., a heterologous nucleic acid. Typically, such an exogenous nucleic acid is introduced into the other species via a recombinant nucleic acid construct. An exogenous nucleic acid can also be a sequence that is native to an organism and that has been reintroduced into cells of that organism. An exogenous nucleic acid that includes a native sequence can often be distinguished from the naturally occurring sequence by the presence of non-natural sequences linked to the exogenous nucleic acid, e.g., non-native regulatory sequences flanking a native sequence in a recombinant nucleic acid construct. In addition, stably transformed exogenous nucleic acids typically are integrated at positions other than the position where the native sequence is found. It will be appreciated that an exogenous nucleic acid may have been introduced into a progenitor and not into the cell under consideration. For example, a transgenic plant containing an exogenous nucleic acid can be the progeny of a cross between a stably transformed plant and a non-transgenic plant. Such progeny are considered to contain the exogenous nucleic acid.

[0169] Similarly, a regulatory protein can be endogenous or exogenous to a particular plant or plant cell. Exogenous regulatory proteins, therefore, can include proteins that are native to a plant or plant cell, but that are expressed in a plant cell via a recombinant nucleic acid construct, e.g., a California poppy plant transformed with a recombinant nucleic acid construct encoding a California poppy transcription factor.

[0170] Likewise, a regulatory region can be exogenous or endogenous to a plant or plant cell. An exogenous regulatory region is a regulatory region that is part of a recombinant nucleic acid construct, or is not in its natural environment. For example, a Nicotiana promoter present on a recombinant nucleic acid construct is an exogenous regulatory region when a Nicotiana plant cell is transformed with the construct.

[0171] A transgenic plant or plant cell in which the amount and/or rate of biosynthesis of one or more sequences of interest is modulated includes at least one recombinant nucleic acid construct, e.g., a nucleic acid construct comprising a nucleic acid encoding a regulatory protein or a nucleic acid construct comprising a regulatory region as described herein. In certain cases, more than one recombinant nucleic acid construct can be included (e.g., two, three, four, five, six, or more recombinant nucleic acid constructs). For example, two recombinant nucleic acid constructs can be included, where one construct includes a nucleic acid encoding one regulatory protein, and another construct includes a nucleic acid encoding a second regulatory protein. Alternatively, one construct can include a nucleic acid encoding one regulatory protein, while another includes a regulatory region. In other cases, a plant cell can include a recombinant nucleic acid construct comprising a nucleic acid encoding a regulatory protein and further comprising a regulatory region that associates with the regulatory protein. In such cases, additional recombinant nucleic acid constructs can also be included in the plant cell, e.g., containing additional regulatory proteins and/or regulatory regions.

[0172] Vectors containing nucleic acids such as those described herein also are provided. A “vector” is a replicon, such as a plasmid, phage, or cosmid, into which another DNA segment may be inserted so as to bring about the replication of the inserted segment. Generally, a vector is capable of replication when associated with the proper control elements. Suitable vector backbones include, for example, those routinely used in the art such as plasmids, viruses, artificial chromosomes, BACs, YACs, or PACs. The term “vector” includes cloning and expression vectors, as well as viral vectors and integrating vectors. An “expression vector” is a vector that includes a regulatory region. Suitable expression vectors include, without limitation, plasmids and viral vectors derived from, for example, bacteriophage, baculoviruses, and retroviruses. Numerous vectors and expression systems are commercially available from such corporations as Novagen (Madison, Wis.), Clontech (Palo Alto, Calif.), Stratagene (La Jolla, Calif.), and Invitrogen/Life Technologies (Carlsbad, Calif.).

[0173] The vectors provided herein also can include, for example, origins of replication, scaffold attachment regions (SARs), and/or markers. A marker gene can confer a selectable phenotype on a plant cell. For example, a marker can confer biocide resistance, such as resistance to an antibiotic (e.g., kanamycin, G418, bleomycin, or hygromycin), or an herbicide (e.g., chlorosulfuron or phosphinothricin). In addition, an expression vector can include a tag sequence designed to facilitate manipulation or detection (e.g., purification or localization) of the expressed polypeptide. Tag sequences, such as green fluorescent protein (GFP), glutathione S-transferase (GST), polyhistidine, c-myc, hemagglutinin, or Flag™ tag (Kodak, New Haven, Conn.) sequences typically are expressed as a fusion with the encoded polypeptide. Such tags can be inserted anywhere within the polypeptide, including at either the carboxyl or amino terminus.

[0174] As described herein, plant cells can be transformed with a recombinant nucleic acid construct to express a polypeptide of interest. The polypeptide can then be extracted and purified using techniques known to those having ordinary skill in the art.

Regulatory Regions

[0175] Particular regulatory regions were examined for their ability to associate with regulatory proteins described herein. The sequences of these regulatory regions are set forth in SEQ ID NOs:237-252. These regulatory regions were initially chosen for investigation because they were thought to be regulatory regions involved in alkaloid biosynthetic pathways in plants such as Arabidopsis, California poppy, Papaver somniferum, and Catharanthus. Using the methods described herein, regulatory proteins that can associate with some of these regulatory regions were identified, and such associations are listed in Table 4 (under Example 5 below). In turn, knowledge of a regulatory protein-regulatory region association facilitates the modulation of expression of sequences of interest that are operably linked to a given regulatory region by the associated regulatory protein. The regulatory protein associated with the regulatory region operably linked to the sequence of interest is itself operably linked to a regulatory region. The amount and specificity of expression of a regulatory protein can be modulated by selecting an appropriate regulatory region to direct expression of the regulatory protein. For example, a regulatory protein can be broadly expressed under the direction of a promoter such as a CaMV ³⁵S promoter. Once expressed, the regulatory protein can directly or indirectly affect expression of a sequence of interest operably linked to another regulatory region, which is associated with the regulatory protein. In some cases, a regulatory protein can be expressed under the direction of a cell type- or tissue-preferential promoter, such as a cell type- or tissue-preferential promoter described below. In some embodiments, a regulatory region useful in the methods described herein has 80% or greater, e.g., 85%, 90%, 95%, 97%, 98%, 99%, or 100%, sequence identity to a regulatory region set forth in SEQ ID NOs:237-252.

[0176] The methods described herein can also be used to identify new regulatory region-regulatory protein association pairs. For example, an ortholog to a given regulatory protein is expected to associate with the associated regulatory region for that regulatory protein.

[0177] It should be noted that for a given regulatory protein listed in Table 4 (under Example 5 below), a regulatory region construct that includes one or more regulatory regions is set forth. A regulatory protein is expected to associate with either one or both such regulatory regions. Similarly, FIGS. 1-22 provide ortholog/homolog sequences and consensus sequences for corresponding regulatory proteins. It is contemplated that each such ortholog/homolog sequence and each polypeptide sequence that corresponds to the consensus sequence of the regulatory protein would also associate with the regulatory regions associated with the given regulatory protein as set forth in Table 4 (under Example 5 below).

[0178] The term “regulatory region” refers to nucleotide sequences that influence transcription or translation initiation and rate, and stability and/or mobility of a transcription or translation product. Regulatory regions include, without limitation, promoter sequences, enhancer sequences, response elements, protein recognition sites, inducible elements, protein binding sequences, 5′ and 3′ untranslated regions (UTRs), transcriptional start sites, termination sequences, polyadenylation sequences, and introns.

[0179] As used herein, the term “operably linked” refers to positioning of a regulatory region and a sequence to be transcribed in a nucleic acid so as to influence transcription or translation of such a sequence. For example, to bring a coding sequence under the control of a promoter, the translation initiation site of the translational reading frame of the polypeptide is typically positioned between one and about fifty nucleotides downstream of the promoter. A promoter can, however, be positioned as much as about 5,000 nucleotides upstream of the translation initiation site, or about 2,000 nucleotides upstream of the transcription start site. A promoter typically comprises at least a core (basal) promoter. A promoter also may include at least one control element, such as an enhancer sequence, an upstream element or an upstream activation region (UAR). For example, a suitable enhancer is a cis-regulatory element (−212 to −154) from the upstream region of the octopine synthase (ocs) gene. Fromm et al., The Plant Cell, 1:977-984 (1989). The choice of promoters to be included depends upon several factors, including, but not limited to, efficiency, selectability, inducibility, desired expression level, and cell- or tissue-preferential expression. It is a routine matter for one of skill in the art to modulate the expression of a coding sequence by appropriately selecting and positioning promoters and other regulatory regions relative to the coding sequence.

[0180] Some suitable promoters initiate transcription only, or predominantly, in certain cell types. For example, a promoter that is active predominantly in a reproductive tissue (e.g., fruit, ovule, pollen, pistils, female gametophyte, egg cell, central cell, nucellus, suspensor, synergid cell, flowers, embryonic tissue, embryo sac, embryo, zygote, endosperm, integument, or seed coat) can be used. Thus, as used herein a cell type- or tissue-preferential promoter is one that drives expression preferentially in the target tissue, but may also lead to some expression in other cell types or tissues as well. Methods for identifying and characterizing promoter regions in plant genomic DNA include, for example, those described in the following references: Jordano et al., Plant Cell, 1:855-866 (1989); Bustos et al., Plant Cell, 1:839-854 (1989); Green et al., EMBO J., 7:4035-4044 (1988); Meier et al., Plant Cell, 3:309-316 (1991); and Zhang et al., Plant Physiology, 110:1069-1079 (1996).

[0181] Examples of various classes of promoters are described below. Some of the promoters indicated below are described in more detail in U.S. Patent Application Ser. Nos. 60/505,689; 60/518,075; 60/544,771; 60/558,869; 60/583,691; 60/619,181; 60/637,140; 10/950,321; 10/957,569; 11/058,689; 11/172,703; 11/208,308; and PCT/US05/23639. Nucleotide sequences of promoters are set forth in SEQ ID NOs:253-330 and SEQ ID NOs:365-371. It will be appreciated that a promoter may meet criteria for one classification based on its activity in one plant species, and yet meet criteria for a different classification based on its activity in another plant species.

[0182] Broadly Expressing Promoters

[0183] A promoter can be said to be “broadly expressing” when it promotes transcription in many, but not necessarily all, plant tissues. For example, a broadly expressing promoter can promote transcription of an operably linked sequence in one or more of the shoot, shoot tip (apex), and leaves, but weakly or not at all in tissues such as roots or stems. As another example, a broadly expressing promoter can promote transcription of an operably linked sequence in one or more of the stem, shoot, shoot tip (apex), and leaves, but can promote transcription weakly or not at all in tissues such as reproductive tissues of flowers and developing seeds. Non-limiting examples of broadly expressing promoters that can be included in the nucleic acid constructs provided herein include the p326 (SEQ ID NO:328), YP0144 (SEQ ID NO:307), YP0190 (SEQ ID NO:311), p13879 (SEQ ID NO:327), YP0050 (SEQ ID NO:287), p32449 (SEQ ID NO:329), 21876 (SEQ ID NO:253), YP0158 (SEQ ID NO:309), YP0214 (SEQ ID NO:313), YP0380 (SEQ ID NO:322), PT0848 (SEQ ID NO:278), and PT0633 (SEQ ID NO:259) promoters. Additional examples include the cauliflower mosaic virus (CaMV) 35S promoter, the mannopine synthase (MAS) promoter, the 1′ or 2′ promoters derived from T-DNA of Agrobacterium tumefaciens, the figwort mosaic virus 34S promoter, actin promoters such as the rice actin promoter, and ubiquitin promoters such as the maize ubiquitin-1 promoter. In some cases, the CaMV 35S promoter is excluded from the category of broadly expressing promoters.

[0184] Root Promoters

[0185] Root-active promoters confer transcription in root tissue, e.g., root endodermis, root epidermis, or root vascular tissues. In some embodiments, root-active promoters are root-preferential promoters, i.e., confer transcription only or predominantly in root tissue. Root-preferential promoters include the YP0128 (SEQ ID NO:304), YP0275 (SEQ ID NO:315), PT0625 (SEQ ID NO:258), PT0660 (SEQ ID NO:261), PT0683 (SEQ ID NO:266), and PT0758 (SEQ ID NO:274) promoters. Other root-preferential promoters include the PT0613 (SEQ ID NO:257), PT0672 (SEQ ID NO:263), PT0688 (SEQ ID NO:267), and PT0837 (SEQ ID NO:276) promoters, which drive transcription primarily in root tissue and to a lesser extent in ovules and/or seeds. Other examples of root-preferential promoters include the root-specific subdomains of the CaMV 35S promoter (Lam et al., Proc. Natl. Acad. Sci. USA, 86:7890-7894 (1989)), root cell specific promoters reported by Conkling et al., Plant Physiol., 93:1203-1211 (1990), and the tobacco RD2 promoter.

[0186] Maturing Endosperm Promoters

[0187] In some embodiments, promoters that drive transcription in maturing endosperm can be useful. Transcription from a maturing endosperm promoter typically begins after fertilization and occurs primarily in endosperm tissue during seed development and is typically highest during the cellularization phase. Most suitable are promoters that are active predominantly in maturing endosperm, although promoters that are also active in other tissues can sometimes be used. Non-limiting examples of maturing endosperm promoters that can be included in the nucleic acid constructs provided herein include the napin promoter, the Arcelin-5 promoter, the phaseolin promoter (Bustos et al., Plant Cell, 1(9):839-853 (1989)), the soybean trypsin inhibitor promoter (Riggs et al., Plant Cell, 1(6):609-621 (1989)), the ACP promoter (Baerson et al., Plant Mol. Biol., 22(2):255-267 (1993)), the stearoyl-ACP desaturase promoter (Slocombe et al., Plant Physiol., 104(4): 167-176 (1994)), the soybean a subunit of β-conglycinin promoter (Chen et al., Proc. Natl. Acad. Sci. USA, 83:8560-8564 (1986)), the oleosin promoter (Hong et al., Plant Mol. Biol., 34(3):549-555 (1997)), and zein promoters, such as the 15 kD zein promoter, the 16 kD zein promoter, 19 kD zein promoter, 22 kD zein promoter and 27 kD zein promoter. Also suitable are the Osgt-1 promoter from the rice glutelin-1 gene (Zheng et al., Mol. Cell Biol., 13:5829-5842 (1993)), the beta-amylase promoter, and the barley hordein promoter. Other maturing endosperm promoters include the YP0092 (SEQ ID NO:290), PT0676 (SEQ ID NO:264), and PT0708 (SEQ ID NO:269) promoters.

[0188] Ovary Tissue Promoters

[0189] Promoters that are active in ovary tissues such as the ovule wall and mesocarp can also be useful, e.g., a polygalacturonidase promoter, the banana TRX promoter, and the melon actin promoter. Examples of promoters that are active primarily in ovules include YP0007 (SEQ ID NO:282), YP0111 (SEQ ID NO:298), YP0092 (SEQ ID NO:290), YP0103 (SEQ ID NO:295), YP0028 (SEQ ID NO:285), YP0121 (SEQ ID NO:303), YP0008 (SEQ ID NO:283), YP0039 (SEQ ID NO:286), YP0115 (SEQ ID NO:299), YP0119 (SEQ ID NO:301), YP0120 (SEQ ID NO:302), and YP0374 (SEQ ID NO:320).

[0190] Embryo Sac/Early Endosperm Promoters

[0191] To achieve expression in embryo sac/early endosperm, regulatory regions can be used that are active in polar nuclei and/or the central cell, or in precursors to polar nuclei, but not in egg cells or precursors to egg cells. Most suitable are promoters that drive expression only or predominantly in polar nuclei or precursors thereto and/or the central cell. A pattern of transcription that extends from polar nuclei into early endosperm development can also be found with embryo sac/early endosperm-preferential promoters, although transcription typically decreases significantly in later endosperm development during and after the cellularization phase. Expression in the zygote or developing embryo typically is not present with embryo sac/early endosperm promoters.

[0192] Promoters that may be suitable include those derived from the following genes: Arabidopsis viviparous-1 (see, GenBank No. U93215); Arabidopsis atmycl (see, Urao (1996) Plant Mol. Biol., 32:571-57; Conceicao (1994) Plant, 5:493-505); Arabidopsis FIE (GenBank No. AF 129516); Arabidopsis MEA; Arabidopsis FIS2 (GenBank No. AF096096); and FIE 1.1 (U.S. Pat. No. 6,906,244). Other promoters that may be suitable include those derived from the following genes: maize MAC1 (see, Sheridan (1996) Genetics, 142:1009-1020); maize Cat3 (see, GenBank No. L05934; Abler (1993) Plant Mol. Biol., 22:10131-1038). Other promoters include the following Arabidopsis promoters: YP0039 (SEQ ID NO:286), YP0101 (SEQ ID NO:293), YP0102 (SEQ ID NO:294), YP0110 (SEQ ID NO:297), YP0117 (SEQ ID NO:300), YP0119 (SEQ ID NO:301), YP0137 (SEQ ID NO:305), DME, YP0285 (SEQ ID NO:316), and YP0212 (SEQ ID NO:312). Other promoters that may be useful include the following rice promoters: p530c10, pOsFIE2-2, pOsMEA, pOsYp102, and pOsYp285.

[0193] Embryo Promoters

[0194] Regulatory regions that preferentially drive transcription in zygotic cells following fertilization can provide embryo-preferential expression. Most suitable are promoters that preferentially drive transcription in early stage embryos prior to the heart stage, but expression in late stage and maturing embryos is also suitable. Embryo-preferential promoters include the barley lipid transfer protein (Ltp1) promoter (Plant Cell Rep (2001) 20:647-654), YP0097 (SEQ ID NO:292), YP0107 (SEQ ID NO:296), YP0088 (SEQ ID NO:289), YP0143 (SEQ ID NO:306), YP0156 (SEQ ID NO:308), PT0650 (SEQ ID NO:260), PT0695 (SEQ ID NO:268), PT0723 (SEQ ID NO:271), PT0838 (SEQ ID NO:277), PT0879 (SEQ ID NO:280), and PT0740 (SEQ ID NO:272).

[0195] Photosynthetic Tissue Promoters

[0196] Promoters active in photosynthetic tissue confer transcription in green tissues such as leaves and stems. Most suitable are promoters that drive expression only or predominantly in such tissues. Examples of such promoters include the ribulose-1,5-bisphosphate carboxylase (RbcS) promoters such as the RbcS promoter from eastern larch (Larix laricina), the pine cab6 promoter (Yamamoto et al., Plant Cell Physiol., 35:773-778 (1994)), the Cab-1 promoter from wheat (Fejes et al., Plant Mol. Biol., 15:921-932 (1990)), the CAB-1 promoter from spinach (Lubberstedt et al., Plant Physiol., 104:997-1006 (1994)), the cabIR promoter from rice (Luan et al., Plant Cell, 4:971-981 (1992)), the pyruvate orthophosphate dikinase (PPDK) promoter from corn (Matsuoka et al., Proc. Natl. Acad. Sci. USA, 90:9586-9590 (1993)), the tobacco Lhcb1*2 promoter (Cerdan et al., Plant Mol. Biol., 33:245-255 (1997)), the Arabidopsis thaliana SUC2 sucrose-H+ symporter promoter (Truernit et al., Planta, 196:564-570 (1995)), and thylakoid membrane protein promoters from spinach (psaD, psaF, psaE, PC, FNR, atpC, atpD, cab, rbcS). Other photosynthetic tissue promoters include PT0535 (SEQ ID NO:255), PT0668 (SEQ ID NO:254), PT0886 (SEQ ID NO:281), YP0144 (SEQ ID NO:307), YP0380 (SEQ ID NO:322), and PT0585 (SEQ ID NO:256).

[0197] Vascular Tissue Promoters

[0198] Examples of promoters that have high or preferential activity in vascular bundles include YP0087 (SEQ ID NO:365), YP0093 (SEQ ID NO:366), YPO108 (SEQ ID NO:367), YP0022 (SEQ ID NO:368), and YP0080 (SEQ ID NO:369). Other vascular tissue-preferential promoters include the glycine-rich cell wall protein GRP 1.8 promoter (Keller and Baumgartner, Plant Cell, 3(10):1051-1061 (1991)), the Commelina yellow mottle virus (COYMV) promoter (Medberry et al., Plant Cell, 4(2): 185-192 (1992)), and the rice tungro bacilliform virus (RTBV) promoter (Dai et al., Proc. Natl. Acad. Sci. USA, 101(2):687-692 (2004)).

[0199] Poppy Capsule Promoters

[0200] Examples of promoters that have high or preferential activity in siliques/fruits, which are botanically equivalent to capsules in opium poppy, include PT0565 (SEQ ID NO:370) and YP0015 (SEQ ID NO:371).

[0201] Inducible Promoters

[0202] Inducible promoters confer transcription in response to external stimuli such as chemical agents or environmental stimuli. For example, inducible promoters can confer transcription in response to hormones such as gibberellic acid or ethylene, or in response to light or drought. Examples of drought-inducible promoters include YP0380 (SEQ ID NO:322), PT0848 (SEQ ID NO:278), YP0381 (SEQ ID NO:323), YP0337 (SEQ ID NO:318), PT0633 (SEQ ID NO:259), YP0374 (SEQ ID NO:320), PT0710 (SEQ ID NO:270), YP0356 (SEQ ID NO:319), YP0385 (SEQ ID NO:325), YP0396 (SEQ ID NO:326), YP0388, YP0384 (SEQ ID NO:324), PT0688 (SEQ ID NO:267), YP0286 (SEQ ID NO:317), YP0377 (SEQ ID NO:321), PD1367 (SEQ ID NO:330), PD0901, and PD0898. Nitrogen-inducible promoters include PT0863 (SEQ ID NO:279), PT0829 (SEQ ID NO:275), PT0665 (SEQ ID NO:262), and PT0886 (SEQ ID NO:281).

[0203] Basal Promoters

[0204] A basal promoter is the minimal sequence necessary for assembly of a transcription complex required for transcription initiation. Basal promoters frequently include a “TATA box” element that may be located between about 15 and about 35 nucleotides upstream from the site of transcription initiation. Basal promoters also may include a “CCAAT box” element (typically the sequence CCAAT) and/or a GGGCG sequence, which can be located between about 40 and about 200 nucleotides, typically about 60 to about 120 nucleotides, upstream from the transcription start site.

[0205] Other Promoters

[0206] Other classes of promoters include, but are not limited to, leaf-preferential, stem/shoot-preferential, callus-preferential, guard cell-preferential, such as PT0678 (SEQ ID NO:265), and senescence-preferential promoters. Promoters designated YP0086 (SEQ ID NO:288), YP0188 (SEQ ID NO:310), YP0263 (SEQ ID NO:314), PT0758 (SEQ ID NO:274), PT0743 (SEQ ID NO:273), PT0829 (SEQ ID NO:275), YP0119 (SEQ ID NO:301), and YP0096 (SEQ ID NO:291), as described in the above-referenced patent applications, may also be useful.

[0207] Other Regulatory Regions

[0208] A 5′ untranslated region (UTR) can be included in nucleic acid constructs described herein. A 5′ UTR is transcribed, but is not translated, and lies between the start site of the transcript and the translation initiation codon and may include the +1 nucleotide. A 3′ UTR can be positioned between the translation termination codon and the end of the transcript. UTRs can have particular functions such as increasing mRNA stability or attenuating translation. Examples of 3′ UTRs include, but are not limited to, polyadenylation signals and transcription termination sequences, e.g., a nopaline synthase termination sequence.

[0209] It will be understood that more than one regulatory region may be present in a recombinant polynucleotide, e.g., introns, enhancers, upstream activation regions, transcription terminators, and inducible elements. Thus, more than one regulatory region can be operably linked to the sequence of a polynucleotide encoding a regulatory protein.

[0210] Regulatory regions, such as promoters for endogenous genes, can be obtained by chemical synthesis or by subcloning from a genomic DNA that includes such a regulatory region. A nucleic acid comprising such a regulatory region can also include flanking sequences that contain restriction enzyme sites that facilitate subsequent manipulation.

Sequences of Interest and Plants and Plant Cells Containing the Same

[0211] Plant cells and plants described herein are useful because expression of a sequence of interest can be modulated to achieve a desired amount and/or specificity in expression by selecting an appropriate association of regulatory region and regulatory protein. A sequence of interest operably linked to a regulatory region can encode a polypeptide or can regulate the expression of a polypeptide. In some embodiments, a sequence of interest is transcribed into an anti-sense molecule. In some embodiments, more than one sequence of interest is present in a plant, e.g., two, three, four, five, six, seven, eight, nine, or ten sequences of interest. Each sequence of interest can be present on the same nucleic acid construct in such embodiments. Alternatively, each sequence of interest can be present on separate nucleic acid constructs. The regulatory region operably linked to each sequence of interest can be the same or can be different. In addition, one or more nucleotide sequences encoding a regulatory protein can be included on a nucleic acid construct that is the same as or separate from that containing an associated regulatory region(s) operably linked to a sequence(s) of interest. The regulatory region operably linked to each sequence encoding a regulatory protein can be the same or different.

[0212] A sequence of interest that encodes a polypeptide can encode a plant polypeptide, a non-plant polypeptide, e.g., a mammalian polypeptide, a modified polypeptide, a synthetic polypeptide, or a portion of a polypeptide. A sequence of interest can be endogenous, i.e., unmodified by recombinant DNA technology from the sequence and structural relationships that occur in nature and operably linked to the unmodified regulatory region. Alternatively, a sequence of interest can be an exogenous nucleic acid.

[0213] Alkaloid Biosynthesis Sequences

[0214] In certain cases, a sequence of interest can be an endogenous or exogenous sequence associated with alkaloid biosynthesis. For example, a transgenic plant cell containing a recombinant nucleic acid encoding a regulatory protein can be effective for modulating the amount and/or rate of biosynthesis of one or more alkaloid compounds. Such effects on alkaloid compounds typically occur via modulation of transcription of one or more endogenous or exogenous sequences of interest operably linked to an associated regulatory region, e.g., endogenous sequences involved in alkaloid biosynthesis, such as native enzymes or regulatory proteins in alkaloid biosynthesis pathways, or exogenous sequences involved in alkaloid biosynthesis pathways introduced via a recombinant nucleic acid construct into a plant cell.

[0215] In some embodiments, the coding sequence can encode a polypeptide involved in alkaloid biosynthesis, e.g., an enzyme involved in biosynthesis of the alkaloid compounds described herein, or a regulatory protein (such as a transcription factor) involved in the biosynthesis pathways of the alkaloid compounds described herein. Other components that may be present in a sequence of interest include introns, enhancers, upstream activation regions, and inducible elements.

[0216] A suitable sequence of interest can encode an enzyme involved in tetrahydrobenzylisoquinoline alkaloid biosynthesis, e.g., selected from the group consisting of those encoding for tyrosine decarboxylase (YDC or TYD; EC 4.1.1.25), norcoclaurine synthase (EC 4.2.1.78), coclaurine N-methyltransferase (EC 2.1.1.140), (R, S)-norcoclaurine 6-O-methyl transferase (NOMT; EC 2.1.1.128), S-adenosyl-L-methionine:3′-hydroxy-N-methylcoclaurine 4′-O-methyltransferase 1 (HMCOMT1; EC 2.1.1.116); S-adenosyl-L-methionine:3′-hydroxy-N-methylcoclaurine 4′-O-methyltransferase 2 (HMCOMT2; EC 2.1.1.116); monophenol monooxygenase (EC1.14.18.1), N-methylcoclaurine 3′-hydroxylase (NMCH EC 1.14.13.71), (R,S)-reticuline 7-O-methyltransferase (ROMT); berbamunine synthase (EC 1.14.21.3), columbamine O-methyltransferase (EC 2.1.1.118), berberine bridge enzyme (BBE; (EC 1.21.3.3), reticuline oxidase (EC 1.21.3.4), dehydro reticulinium ion reductase (EC 1.5.1.27), (RS)-1-benzyl-1,2,3,4-tetrahydroisoquinoline N-methyltransferase (EC 2.1.1.115), (S)-scoulerine oxidase (EC 1.14.21.2), (S)-cheilanthifoline oxidase (EC 1.14.21.1), (S)-tetrahydroprotoberberine N-methyltransferase (EC 2.1.1.122), (S)-canadine synthase (EC 1.14.21.5), tetrahydroberberine oxidase (EC 1.3.3.8), columbamine oxidase (EC 1.21.3.2), and other enzymes, such as protopine-6-monooxygenase, related to the biosynthesis of tetrahydrobenzylisoquinoline alkaloids.

[0217] In other cases, a sequence of interest can be an enzyme involved in benzophenanthridine alkaloid biosynthesis, e.g., selected from the group consisting of those encoding for dihydrobenzophenanthridine oxidase (EC 1.5.3.12), dihydrosanguinarine 10-hydroxylase (EC 1.14.13.56), 10-hydroxydihydrosanguinarine 10-O-methyltransferase (EC 2.1.1.119), dihydrochelirubine 12-hydroxylase (EC 1.14.13.57), 12-hydroxydihydrochelirubine 12-O-methyltransferase (EC 2.1.1.120), and other enzymes, including dihydrobenzophenanthridine oxidase and dihydrosanguinarine 10-monooxygenase, related to the biosynthesis of benzophenanthridine alkaloids.

[0218] In yet other cases, a sequence is involved in morphinan alkaloid biosynthesis, e.g., selected from the group consisting of salutaridinol 7-O-acetyltransferase (SAT; EC 2.3.1.150), salutaridine synthase (EC 1.14.21.4), salutaridine reductase (EC 1.1.1.248), morphine 6-dehydrogenase (EC 1.1.1.218); and codeinone reductase (CR; EC 1.1.1.247); and other sequences related to the biosynthesis of morphinan/opiate alkaloids.

[0219] In other embodiments, a suitable sequence encodes an enzyme involved in purine alkaloid (e.g., xanthines, such as caffeine) biosynthesis such as xanthosine methyltransferase, 7-N-methylxanthine methyltransferase (theobromine synthase), or 3,7-dimethylxanthine methyltransferase (caffeine synthase).

[0220] In some embodiments, a suitable sequence encodes an enzyme involved in biosynthesis of indole alkaloids compounds such as tryptophane decarboxylase, strictosidine synthase, strictosidine glycosidase, dehydrogeissosshizine oxidoreductase, polyneuridine aldehyde esterase, sarpagine bridge enzyme, vinorine reductase, vinorine synthase, vinorine hydroxylase, 17-O-acetylajmalan acetylesterase, or norajamaline N-methyl transferase. In other embodiments, a suitable sequence of interest encodes an enzyme involved in biosynthesis of vinblastine, vincristine and compounds derived from them, such as tabersonine 16-hydroxylase, 16-hydroxytabersonine 16-O-methyl transferase, desacetoxyvindoline 4-hydroxylase, or desacetylvindoline O-acetyltransferasesynthase.

[0221] In still other embodiments, a suitable sequence encodes an enzyme involved in biosynthesis of pyridine, tropane, and/or pyrrolizidine alkaloids such as arginine decarboxylase, spermidine synthase, ornithine decarboxylase, putrescine N-methyl transferase, tropinone reductase, hyoscyamine 6-beta-hydroxylase, diamine oxidase, and tropinone dehydrogenase.

[0222] Other Sequences of Interest

[0223] Other sequences of interest can encode a therapeutic polypeptide for use with mammals such as humans, e.g., as set forth in Table 1, below. In certain cases, a sequence of interest can encode an antibody or antibody fragment. An antibody or antibody fragment includes a humanized or chimeric antibody, a single chain Fv antibody fragment, an Fab fragment, and an F(ab)₂ fragment. A chimeric antibody is a molecule in which different portions are derived from different animal species, such as those having a variable region derived from a mouse monoclonal antibody and a human immunoglobulin constant region. Antibody fragments that have a specific binding affinity can be generated by known techniques. Such antibody fragments include, but are not limited to, F(ab′)₂ fragments that can be produced by pepsin digestion of an antibody molecule, and Fab fragments that can be generated by deducing the disulfide bridges of F(ab′)₂ fragments. Single chain Fv antibody fragments are formed by linking the heavy and light chain fragments of the Fv region via an amino acid bridge (e.g., 15 to 18 amino acids), resulting in a single chain polypeptide. Single chain Fv antibody fragments can be produced through standard techniques, such as those disclosed in U.S. Pat. No. 4,946,778. U.S. Pat. No. 6,303,341 discloses immunoglobulin receptors. U.S. Pat. No. 6,417,429 discloses immunoglobulin heavy- and light-chain polypeptides.

TABLE 1
Human Therapeutic Proteins

| | | |
|---|---|---|
| Bromelain | Humatrope ® | Proleukin ® |
| Chymopapain | Humulin ® (insulin) | Protropin ® |
| Papain ® | Infergen ® | Recombivax-HB ® |
| Activase ® | Interferon-gamma-1a | Recormon ® |
| Albutein ® | Interleukin-2 | Remicade ® (s-TNF-r) |
| Angiotensin II | Intron ® | ReoPro ® |
| Asparaginase | Leukine ® (GM-CSF) | Retavase ® (TPA) |
| Avonex ® | Nartogastrim ® | Roferon-A ® |
| Betaseron ® | Neumega ® | Pegaspargas |
| BioTropin ® | Neupogen ® | Prandin ® |
| Cerezyme ® | Norditropin ® | Procrit ® |
| Enbrel ® (s-TNF-r) | Novolin ® (insulin) | Filgastrim ® |
| Engerix-B ® | Nutropin ® | Genotropin ® |
| Epogen ® | Oncaspar ® | Geref ® |
| Sargramostrim | Tripedia ® | Trichosanthin |
| TriHIBit ® | Venoglobin-S ® (HIG) | |

[0224] A sequence of interest can encode a polypeptide or result in a transcription product anti-sense molecule that confers insect resistance, bacterial disease resistance, fungal disease resistance, viral disease resistance, nematode disease resistance, herbicide resistance, enhanced grain composition or quality, enhanced nutrient composition, nutrient transporter functions, enhanced nutrient utilization, enhanced environmental stress tolerance, reduced mycotoxin contamination, female sterility, a selectable marker phenotype, a screenable marker phenotype, a negative selectable marker phenotype, or altered plant agronomic characteristics. Specific examples include, without limitation, a chitinase coding sequence and a glucan endo-1,3-β-glucosidase coding sequence. In some embodiments, a sequence of interest encodes a bacterial ESPS synthase that confers resistance to glyphosate herbicide or a phosphinothricin acetyl transferase coding sequence that confers resistance to phosphinothricin herbicide.

[0225] A sequence of interest can encode a polypeptide involved in the production of industrial or pharmaceutical chemicals, modified and specialty oils, enzymes, or renewable non-foods such as fuels and plastics, vaccines and antibodies. U.S. Pat. No. 5,824,779 discloses phytase-protein-pigmenting concentrate derived from green plant juice. U.S. Pat. No. 5,900,525 discloses animal feed compositions containing phytase derived from transgenic alfalfa. U.S. Pat. No. 6,136,320 discloses vaccines produced in transgenic plants. U.S. Pat. No. 6,255,562 discloses insulin. U.S. Pat. No. 5,958,745 discloses the formation of copolymers of 3-hydroxy butyrate and 3-hydroxy valerate. U.S. Pat. No. 5,824,798 discloses starch synthases. U.S. Pat. No. 6,087,558 discloses the production of proteases in plants. U.S. Pat. No. 6,271,016 discloses an anthranilate synthase gene for tryptophan overproduction in plants.

Methods of Inhibiting Expression of a Sequence of Interest

[0226] The polynucleotides and recombinant vectors described herein can be used to express or inhibit expression of a gene, such as an endogenous gene involved in alkaloid biosynthesis, e.g., to alter alkaloid biosynthetic pathways in a plant species of interest. The term “expression” refers to the process of converting genetic information of a polynucleotide into RNA through transcription, which is catalyzed by an enzyme, RNA polymerase, and into protein, through translation of mRNA on ribosomes. “Up-regulation” or “activation” refers to regulation that increases the production of expression products (mRNA, polypeptide, or both) relative to basal or native states, while “down-regulation” or “repression” refers to regulation that decreases production of expression products (mRNA, polypeptide, or both) relative to basal or native states.

[0227] “Modulated level of gene expression” as used herein refers to a comparison of the level of expression of a transcript of a gene or the amount of its corresponding polypeptide in the presence and absence of a regulatory protein described herein, and refers to a measurable or observable change in the level of expression of a transcript of a gene or the amount of its corresponding polypeptide relative to a control plant or plant cell under the same conditions (e.g., as measured through a suitable assay such as quantitative RT-PCR, a “northern blot,” a “western blot” or through an observable change in phenotype, chemical profile, or metabolic profile). A modulated level of gene expression can include up-regulated or down-regulated expression of a transcript of a gene or polypeptide relative to a control plant or plant cell under the same conditions. Modulated expression levels can occur under different environmental or developmental conditions or in different locations than those exhibited by a plant or plant cell in its native state.

[0228] A number of nucleic acid based methods, including antisense RNA, co-suppression, ribozyme directed RNA cleavage, and RNA interference (RNAi) can be used to inhibit protein expression in plants. Antisense technology is one well-known method. In this method, a nucleic acid segment from a gene to be repressed is cloned and operably linked to a promoter so that the antisense strand of RNA is transcribed. The recombinant vector is then transformed into plants, as described above, and the antisense strand of RNA is produced. The nucleic acid segment need not be the entire sequence of the gene to be repressed, but typically will be substantially complementary to at least a portion of the sense strand of the gene to be repressed. Generally, higher homology can be used to compensate for the use of a shorter sequence. Typically, a sequence of at least 30 nucleotides is used, e.g., at least 40, 50, 80, 100, 200, 500 nucleotides or more.

[0229] Constructs containing operably linked nucleic acid molecules in the sense orientation can also be used to inhibit the expression of a gene. The transcription product can be similar or identical to the sense coding sequence of a polypeptide of interest. The transcription product can also be unpolyadenylated, lack a 5′ cap structure, or contain an unsplicable intron. Methods of co-suppression using a full-length cDNA as well as a partial cDNA sequence are known in the art. See, e.g., U.S. Pat. No. 5,231,020.

[0230] In another method, a nucleic acid can be transcribed into a ribozyme, or catalytic RNA, that affects expression of an mRNA. (See, U.S. Pat. No. 6,423,885). Ribozymes can be designed to specifically pair with virtually any target RNA and cleave the phosphodiester backbone at a specific location, thereby functionally inactivating the target RNA. Heterologous nucleic acids can encode ribozymes designed to cleave particular mRNA transcripts, thus preventing expression of a polypeptide. Hammerhead ribozymes are useful for destroying particular mRNAs, although various ribozymes that cleave mRNA at site-specific recognition sequences can be used. Hammerhead ribozymes cleave mRNAs at locations dictated by flanking regions that form complementary base pairs with the target mRNA. The sole requirement is that the target RNA contain a 5′-UG-3′ nucleotide sequence. The construction and production of hammerhead ribozymes is known in the art. See, for example, U.S. Pat. No. 5,254,678 and WO 02/46449 and references cited therein. Hammerhead ribozyme sequences can be embedded in a stable RNA such as a transfer RNA (tRNA) to increase cleavage efficiency in vivo. Perriman et al., Proc. Natl. Acad. Sci. USA, 92(13):6175-6179 (1995); de Feyter and Gaudron, Methods in Molecular Biology, Vol. 74, Chapter 43, “Expressing Ribozymes in Plants”, Edited by Turner, P.C., Humana Press Inc., Totowa, N.J. RNA endoribonucleases which have been described, such as the one that occurs naturally in Tetrahymena thermophila, can be useful. See, for example, U.S. Pat. Nos. 4,987,071 and 6,423,885.

[0231] RNAi can also be used to inhibit the expression of a gene. For example, a construct can be prepared that includes a sequence that is transcribed into an interfering RNA. Such an RNA can be one that can anneal to itself, e.g., a double stranded RNA having a stem-loop structure. One strand of the stem portion of a double stranded RNA comprises a sequence that is similar or identical to the sense coding sequence of the polypeptide of interest, and that is from about 10 nucleotides to about 2,500 nucleotides in length. The length of the sequence that is similar or identical to the sense coding sequence can be from 10 nucleotides to 500 nucleotides, from 15 nucleotides to 300 nucleotides, from 20 nucleotides to 100 nucleotides, or from 25 nucleotides to 100 nucleotides. The other strand of the stem portion of a double stranded RNA comprises a sequence that is similar or identical to the antisense strand of the coding sequence of the polypeptide of interest, and can have a length that is shorter, the same as, or longer than the corresponding length of the sense sequence. The loop portion of a double stranded RNA can be from 10 nucleotides to 5,000 nucleotides, e.g., from 15 nucleotides to 1,000 nucleotides, from 20 nucleotides to 500 nucleotides, or from 25 nucleotides to 200 nucleotides. The loop portion of the RNA can include an intron. A construct including a sequence that is transcribed into an interfering RNA is transformed into plants as described above. Methods for using RNAi to inhibit the expression of a gene are known to those of skill in the art. See, e.g., U.S. Pat. Nos. 5,034,323; 6,326,527; 6,452,067; 6,573,099; 6,753,139; and 6,777,588. See also WO 97/01952; WO 98/53083; WO 99/32619; WO 98/36083; and U.S. Patent Publications 20030175965, 20030175783, 20040214330, and 20030180945.

[0232] In some nucleic-acid based methods for inhibition of gene expression in plants, a suitable nucleic acid can be a nucleic acid analog. Nucleic acid analogs can be modified at the base moiety, sugar moiety, or phosphate backbone to improve, for example, stability, hybridization, or solubility of the nucleic acid. Modifications at the base moiety include deoxyuridine for deoxythymidine, and 5-methyl-2′-deoxycytidine and 5-bromo-2′-deoxycytidine for deoxycytidine. Modifications of the sugar moiety include modification of the 2′ hydroxyl of the ribose sugar to form 2′-O-methyl or 2′-O-allyl sugars. The deoxyribose phosphate backbone can be modified to produce morpholino nucleic acids, in which each base moiety is linked to a six-membered morpholino ring, or peptide nucleic acids, in which the deoxyphosphate backbone is replaced by a pseudopeptide backbone and the four bases are retained. See, for example, Summerton and Weller, 1997, Antisense Nucleic Acid Drug Dev., 7:187-195; Hyrup et al., Bioorgan. Med. Chem., 4:5-23 (1996). In addition, the deoxyphosphate backbone can be replaced with, for example, a phosphorothioate or phosphorodithioate backbone, a phosphoroamidite, or an alkyl phosphotriester backbone.

Transgenic Plant Cells and Plants

[0233] Provided herein are transgenic plant cells and plants comprising at least one recombinant nucleic acid construct or exogenous nucleic acid. A recombinant nucleic acid construct or exogenous nucleic acid can include a regulatory region as described herein, a nucleic acid encoding a regulatory protein as described herein, or both. In certain cases, a transgenic plant cell or plant comprises at least two recombinant nucleic acid constructs or exogenous nucleic acids, one including a regulatory region, and one including a nucleic acid encoding the associated regulatory protein.

[0234] A plant or plant cell used in methods of the invention contains a recombinant nucleic acid construct as described herein. A plant or plant cell can be transformed by having a construct integrated into its genome, i.e., can be stably transformed. Stably transformed cells typically retain the introduced nucleic acid with each cell division. A plant or plant cell can also be transiently transformed such that the construct is not integrated into its genome. Transiently transformed cells typically lose all or some portion of the introduced nucleic acid construct with each cell division such that the introduced nucleic acid cannot be detected in daughter cells after a sufficient number of cell divisions. Both transiently transformed and stably transformed transgenic plants and plant cells can be useful in the methods described herein.

[0235] Typically, transgenic plant cells used in methods described herein constitute part or all of a whole plant. Such plants can be grown in a manner suitable for the species under consideration, either in a growth chamber, a greenhouse, or in a field. Transgenic plants can be bred as desired for a particular purpose, e.g., to introduce a recombinant nucleic acid into other lines, to transfer a recombinant nucleic acid to other species or for further selection of other desirable traits. Alternatively, transgenic plants can be propagated vegetatively for those species amenable to such techniques. Progeny includes descendants of a particular plant or plant line. Progeny of an instant plant include seeds formed on F₁, F₂, F₃, F₄, F₅, F₆ and subsequent generation plants, or seeds formed on BC₁, BC₂, BC₃, and subsequent generation plants, or seeds formed on F₁BC₁, F₁BC₂, F₁BC₃, and subsequent generation plants. Seeds produced by a transgenic plant can be grown and then selfed (or outcrossed and selfed) to obtain seeds homozygous for the nucleic acid construct.

[0236] Transgenic plant cells growing in suspension culture, or tissue or organ culture, can be useful for extraction of alkaloid compounds. For the purposes of this invention, solid and/or liquid tissue culture techniques can be used. When using solid medium, transgenic plant cells can be placed directly onto the medium or can be placed onto a filter film that is then placed in contact with the medium. When using liquid medium, transgenic plant cells can be placed onto a floatation device, e.g., a porous membrane that contacts the liquid medium. Solid medium typically is made from liquid medium by adding agar. For example, a solid medium can be Murashige and Skoog (MS) medium containing agar and a suitable concentration of an auxin, e.g., 2,4-dichlorophenoxyacetic acid (2,4-D), and a suitable concentration of a cytokinin, e.g., kinetin.

[0237] When transiently transformed plant cells are used, a reporter sequence encoding a reporter polypeptide having a reporter activity can be included in the transformation procedure and an assay for reporter activity or expression can be performed at a suitable time after transformation. A suitable time for conducting the assay typically is about 1-21 days after transformation, e.g., about 1-14 days, about 1-7 days, or about 1-3 days. The use of transient assays is particularly convenient for rapid analysis in different species, or to confirm expression of a heterologous regulatory protein whose expression has not previously been confirmed in particular recipient cells.

[0238] Techniques for introducing nucleic acids into monocotyledonous and dicotyledonous plants are known in the art, and include, without limitation, Agrobacterium-mediated transformation, viral vector-mediated transformation, electroporation and particle gun transformation, e.g., U.S. Pat. Nos. 5,538,880, 5,204,253, 6,329,571 and 6,013,863. If a cell or tissue culture is used as the recipient tissue for transformation, plants can be regenerated from transformed cultures if desired, by techniques known to those skilled in the art. See, e.g., Allen et al., “RNAi-mediated replacement of morphine with the normarcotic alkaloid reticuline in opium poppy,” Nature Biotechnology 22(12): 1559-1566 (2004); Chitty et al., “Genetic transformation in commercial Tasmanian cultures of opium poppy, Papaver somniferum, and movement of transgenic pollen in the field,” Funct. Plant Biol. 30:1045-1058 (2003); and Park et al., J. Exp. Botany 51(347):1005-1016 (2000).

Plant Species

[0239] The polynucleotides and vectors described herein can be used to transform a number of monocotyledonous and dicotyledonous plants and plant cell systems. A suitable group of plant species includes dicots, such as poppy, safflower, alfalfa, soybean, cotton, coffee, rapeseed (high erucic acid and canola), or sunflower. Also suitable are monocots such as corn, wheat, rye, barley, oat, rice, millet, amaranth or sorghum. Also suitable are vegetable crops or root crops such as lettuce, carrot, onion, broccoli, peas, sweet corn, popcorn, tomato, potato, beans (including kidney beans, lima beans, dry beans, green beans) and the like. Also suitable are fruit crops such as grape, strawberry, pineapple, melon (e.g., watermelon, cantaloupe), peach, pear, apple, cherry, orange, lemon, grapefruit, plum, mango, banana, and palm.

[0240] Thus, the methods and compositions described herein can be utilized with dicotyledonous plants belonging to the orders Magniolales, Illiciales, Laurales, Piperales, Aristochiales, Nymphaeales, Ranunculales, Papeverales, Sarraceniaceae, Trochodendrales, Hamamelidales, Eucomiales, Leitneriales, Myricales, Fagales, Casuarinales, Caryophyllales, Batales, Polygonales, Plumbaginales, Dilleniales, Theales, Malvales, Urticales, Lecythidales, Violales, Salicales, Capparales, Ericales, Diapensales, Ebenales, Primulales, Rosales, Fabales, Podostemales, Haloragales, Myrtales, Cornales, Proteales, Santales, Rafflesiales, Celastrales, Euphorbiales, Rhamnales, Sapindales, Juglandales, Geraniales, Polygalales, Umbellales, Gentianales, Polemoniales, Lamiales, Plantaginales, Scrophulariales, Campanulales, Rubiales, Dipsacales, and Asterales. Methods described herein can also be utilized with monocotyledonous plants belonging to the orders Alismatales, Hydrocharitales, Najadales, Triuridales, Commelinales, Eriocaulales, Restionales, Poales, Juncales, Cyperales, Typhales, Bromeliales, Zingiberales, Arecales, Cyclanthales, Pandanales, Arales, Lilliales, and Orchidales, or with plants belonging to Gymnospermae, e.g., Pinales, Ginkgoales, Cycadales and Gnetales.

[0241] The invention has use over a broad range of plant species, including species from the genera Allium, Alseodaphne, Anacardium, Arachis, Asparagus, Atropa, Avena, Beilschmiedia, Brassica, Citrus, Citrullus, Capsicum, Catharanthus, Carthamus, Cocculus, Cocos, Coffea, Croton, Cucumis, Cucurbita, Daucus, Duguetia, Elaeis, Eschscholzia, Ficus, Fragaria, Glaucium, Glycine, Gossypium, Helianthus, Heterocallis, Hevea, Hordeum, Hyoscyamus, Lactuca, Landolphia, Linum, Litsea, Lolium, Lupinus, Lycopersicon, Malus, Manihot, Majorana, Medicago, Musa, Nicotiana, Olea, Oryza, Panicum, Pannesetum, Papaver, Parthenium, Persea, Phaseolus, Pinus, Pistachia, Pisum, Pyrus, Prunus, Raphanus, Rhizocarya, Ricinus, Secale, Senecio, Sinomenium, Sinapis, Solanum, Sorghum, Stephania, Theobroma, Trigonella, Triticum, Vicia, Vinca, Vitis, Vigna, and Zea.

[0242] Particularly suitable plants with which to practice the invention include plants that are capable of producing one or more alkaloids. A “plant that is capable of producing one or more alkaloids” refers to a plant that is capable of producing one or more alkaloids even when it is not transgenic for a regulatory protein described herein. For example, a plant from the Solanaceae or Papaveraceae family is capable of producing one or more alkaloids when it is not transgenic for a regulatory protein described herein. In certain cases, a plant or plant cell may be transgenic for sequences other than the regulatory protein sequences described herein, e.g., growth factors or stress modulators, and can still be characterized as “capable of producing one or more alkaloids,” e.g., a Solanaceae family member transgenic for a growth factor but not transgenic for a regulatory protein described herein.

[0243] Useful plant families that are capable of producing one or more alkaloids include the Papaveraceae, Berberidaceae, Lauraceae, Menispermaceae, Euphorbiaceae, Leguminosae, Boraginaceae, Apocynaceae, Asclepiadaceae, Liliaceae, Gnetaceae, Erythroxylaceae, Convolvulaceae, Ranunculaeceae, Rubiaceae, Solanaceae, and Rutaceae families. The Papaveraceae family, for example, contains about 250 species found mainly in the northern temperate regions of the world and includes plants such as California poppy and Opium poppy. Useful genera within the Papaveraceae family include the Papaver (e.g., Papaver bracteatum, Papaver orientate, Papaver setigerum, and Papaver somniferum), Sanguinaria, Dendromecon, Glaucium, Meconopsis, Chelidonium, Eschscholzioideae (e.g., Eschscholzia, Eschscholzia california), and Argemone (e.g., Argemone hispida, Argemone mexicana, and Argemone munita) genera. Other alkaloid producing species with which to practice this invention include Croton salutaris, Croton balsamifera, Sinomenium acutum, Stephania cepharantha, Stephania zippeliana, Litsea sebiferea, Alseodaphne perakensis, Cocculus laurifolius, Duguetia obovata, Rhizocarya racemifera, and Beilschmiedia oreophila, or other species listed in Table 2, below.

Alkaloid Compounds

[0244] Compositions and methods described herein are useful for producing one or more alkaloid compounds. Alkaloid compounds are nitrogenous organic molecules that are typically derived from plants. Alkaloid biosynthetic pathways often include amino acids as reactants. Alkaloid compounds can be mono-, bi-, or polycyclic compounds. Bi- or poly-cyclic compounds can include bridged structures or fused rings. In certain cases, an alkaloid compound can be a plant secondary metabolite.

[0245] The regulatory proteins described previously can modulate transcription of sequences involved in the biosynthesis of alkaloid compounds. Thus, a transgenic plant or cell comprising a recombinant nucleic acid expressing such a regulatory protein can be effective for modulating the amount and/or rate of biosynthesis of one or more of such alkaloids in a plant containing the associated regulatory region, either as a genomic sequence or introduced in a recombinant nucleic acid construct.

[0246] An amount of one or more of any individual alkaloid compound can be modulated, e.g., increased or decreased, relative to a control plant or cell not transgenic for the particular regulatory protein using the methods described herein. In certain cases, therefore, more than one alkaloid compound (e.g., two, three, four, five, six, seven, eight, nine, ten or even more alkaloid compounds) can have its amount modulated relative to a control plant or cell that is not transgenic for a regulatory protein described herein.

[0247] Alkaloid compounds can be grouped into classes based on chemical and structural features. Alkaloid classes described herein include, without limitation, tetrahydrobenzylisoquinoline alkaloids, morphinan alkaloids, benzophenanthridine alkaloids, monoterpenoid indole alkaloids, bisbenzylisoquinoline alkaloids, pyridine alkaloids, purine alkaloids, tropane alkaloids, quinoline alkaloids, terpenoid alkaloids, betaine alkaloids, steroid alkaloids, acridone alkaloids, and phenethylamine alkaloids. Other classifications may be known to those having ordinary skill in the art. Alkaloid compounds whose amounts are modulated relative to a control plant can be from the same alkaloid class or from different alkaloid classes.

[0248] In certain embodiments, a morphinan alkaloid compound that is modulated is salutaridine, salutaridinol, salutaridinol acetate, thebaine, isothebaine, papaverine, narcotine, narceine, hydrastine, oripavine, morphinone, morphine, codeine, codeinone, and neopinone. Other morphinan analog alkaloid compounds of interest include sinomenine, flavinine, oreobeiline, and zipperine.

[0249] In other embodiments, a tetrahydrobenzylisoquinoline alkaloid compound that is modulated is 2′-norberbamunine, S-coclaurine, S-norcoclaurine, R-N-methyl-coclaurine, S-N-methylcoclaurine, S-3′-hydroxy-N-methylcoclaurine, aromarine, S-3-hydroxycoclaurine, S-norreticuline, R-norreticuline, S-reticuline, R-reticuline, S-scoulerine, S-cheilanthifoline, S-stylopine, S-cis-N-methyl-stylopine, protopine, 6-hydroxy-protopine, 1,2-dehydro-reticuline, S-tetrahydrocolumbamine, columbamine, palmatine, tetrahydropalmatine, S-canadine, berberine, noscapine, S-norlaudenosoline, 6-O-methylnorlaudanosoline, and nororientaline.

[0250] In some embodiments, a benzophenanthridine alkaloid compound can be modulated, which can be dihydrosanguinarine, sanguinarine, dihydroxy-dihydro-sanguinarine, 12-hydroxy-dihydrochelirubine, 10-hydroxy-dihydro-sanguinarine, dihydro-macarpine, dihydro-chelirubine, dihydro-sanguinarine, chelirubine, 12-hydroxy-chelirubine, or macarpine.

[0251] In yet other embodiments, monoterpenoid indole alkaloid compounds that are modulated include vinblastine, vincristine, yohimbine, ajmalicine, ajmaline, and vincamine. In other cases, a pyridine alkaloid is modulated. A pyridine alkaloid can be piperine, coniine, trigonelline, arecaidine, guvacine, pilocarpine, cytosine, nicotine, and sparteine. A tropane alkaloid that can be modulated includes atropine, cocaine, tropacocaine, hygrine, ecgonine, (−) hyoscyamine, (−) scopolamine, and pelletierine. A quinoline alkaloid that is modulated can be quinine, strychnine, brucine, veratrine, or cevadine. Acronycine is an example of an acridone alkaloid.

[0252] In some cases, a phenylethylamine alkaloid can be modulated, which can be MDMA, methamphetamine, mescaline, and ephedrine. In other cases, a purine alkaloid is modulated, such as the xanthines caffeine, theobromine, theacrine, and theophylline.

[0253] Bisbenzylisoquinoline alkaloids that can be modulated in amount include (+)tubocurarine, dehatrine, (+)thalicarpine, aromoline, guatteguamerine, berbamunine, and isotetradine. Yet another alkaloid compound that can be modulated in amount is 3,4-dihydroxyphenylacetaldehyde.

[0254] Certain useful alkaloid compounds, with associated plant species that are capable of producing them, are listed in Table 2, below.

TABLE 2
Alkaloid Compound Table

| Alkaloid Name | Plant Source(s) |
|---|---|
| Apomorphine | Papaver somniferum |
| Hemsleyadine | Aconitum hemsleyanum, Hemsleya amabilis |
| Anabasine | Anabasis sphylla |
| Aconitine | Aconitum spp. |
| Anisodamine | Anisodus tanguticus |
| Anisodine | Datura sanguinera |
| Arecoline | Areca catechu |
| Atropine | Atropa belladonna, Datura stomonium |
| Homatropine | Atropa belladonna |
| Berberine | Berberis spp. and Mahonia spp. |
| Caffeine | Camellia sinensis, Theobroma cacao, Coffea |
| | arabica, Cola spp. |
| Camptothecin | Camptotheca acuminata |
| Orothecin | Camptotheca acuminata |
| 9-amino camptothecin | Camptotheca acuminata |
| Topotecan | Camptotheca acuminata |
| Irinotecan | Camptotheca acuminata |
| Castanospermine | Castanosperma australe, Alexa spp. |
| Vinblastine | Catharanthus roseus |
| Vincristine | Catharanthus roseus |
| Vinorelbine | Catharanthus roseus |
| Emetine | Alangium lamarkii, Cephaelis ipecacuanha, |
| | Psychotria spp. |
| Homoharringtonine | Cephalotaxus spp. |
| Harringtonine | Cephalotaxus spp. |
| Tubocurarine | Chondodendron tomentosum |
| Quinine | Cinchona officinalis, Cinchona spp., Remijia |
| | pedunculata |
| Quinidine | Cinchona spp., Remijia pedunculata |
| Cissampareine | Cissampelos pareira |
| Cabergoline | Claviceps pupurea |
| Colchicine | Colchicum autumnale |
| Demecolcine | Colchicum spp., Merendera spp. |
| Palmatine | Coptis japonica, Berberis spp., Mahonia spp. |
| Tetrahydropalmatine | Coptis japonica, Berberis spp., Mahonia spp. |
| Monocrotaline | Crotalaria spp. |
| Sparteine | Cytisus scoparius, Sophora pschycarpa, |
| | Ammodendron spp. |
| Changrolin | Dichroa febrifuga |
| Ephedrine | Ephedra sinica, Ephedra spp. |
| Cocaine | Erythroxylum coca |
| Rotundine | Eschsholtzia californica, Stephania sinica, |
| | Eschsholtzia spp., Argemone spp. |
| Galanthamine | Galanthus wornorii |
| Gelsemin | Gelsemium sempervivens |
| Glaucine | Glaucium flavum, Berberis spp. and |
| | Mahonia spp. |
| Indicine | Heliotropium indicum & Messerschmidia |
| | argentea |
| Hydrastine | Hydrastis canadensis |
| Hyoscyamine | Hyoscyamus, Atropa, Datura, Scopolia spp. |
| a-Lobeline | Lobelia spp. |
| Huperzine A | Lycopodium serratum (= Huperzia serrata), |
| | Lycopodium spp. |
| Ecteinascidin 743 | Marine tunicate - Ecteinascidia turbinata |
| Nicotine | Nicotiana tabacum |
| Ellipticine | Ochrosia spp., Aspidospera subincanum, |
| | Bleekeria vitiensis |
| 9-Methoxyellipticine | Ochrosia spp., Excavatia coccinea, Bleekeria |
| | vitiensis |
| Codeine | Papaver somniferum |
| Hydrocodone | Papaver somniferum |
| Hydromorphone | Papaver somniferum |
| Morphine | Papaver somniferum |
| Narceine | Papaver somniferum |
| Oxycodone | Papaver somniferum |
| Oxymorphone | Papaver somniferum |
| Papaverine | Papaver somniferum, Rauwolfia serpentina |
| Thebaine | Papaver bracteatum, Papaver spp. |
| Yohimbine | Pausinystalia yohimbe, Rauwolfia, Vinca, & |
| | Catharanthus spp. |
| Physostigmine | Physostigma venenosum |
| Pilocarpine | Pilocarpus microphyllus, Philocarpus spp. |
| Oxandrin | Pseudoxandra lucida |
| Sarpagine | Rauwolfia & Vinca spp. |
| Deserpidine | Rauwolfia canescens, Rauwolfia spp. |
| Rescinnamine | Rauwolfia spp. |
| Reserpine | Rauwolfia serpentina, Rauwolfia spp. |
| Ajmaline | Rauwolfia serpentina, Rauwolfia spp., Melodinus |
| | balansae, Tonduzia longifolia |
| Ajmalicine | Rauwolfia spp., Vinca rosea |
| Sanguinarine | Sanguinaria canadensis, Eschscholtzia |
| | californica |
| Matrine | Sophora spp. |
| Tetrandrine | Stephania tetrandra |
| Strychnine | Strychnos nux-vomica, Strychnos spp. |
| Brucine | Strychnos spp. |
| Protoveratrines A, B | Veratrum spp. |
| Cyclopamine | Vertatrum spp. |
| Veratramine | Veratrum spp. |
| Vasicine | Vinca minor, Galega officinalis |
| Vindesine | Vinca rosea |
| Vincamine | Vinca spp. |
| Buprenorphine | Papaver somniferum |
| Cimetropium Bromide | Atropa, Datura, Scopolia, Hyoscyamus spp. |
| Levallorphan | Papaver somniferum |
| Serpentine | Rauwolfvia spp. and Catharanthus spp. |
| Noscapine | Papaver somniferum |
| Scopolamine | Atropa, Datura, Scopolia, Hyoscyamus spp. |
| Salutaridine | Croton salutaris, Croton balsamifera, Papaver |
| | spp. and Glaucium spp. |
| Sinomenine | Sniomenium acutum and Stephania cepharantha |
| Flavinine | Litsea sebiferea, Alseodaphne perakensis, |
| | Cocculus laurifolius, Duguetia obovata and |
| | Rhizocarya racemifera |
| Oreobeiline | Beilschmiedia oreophila |
| Zippeline | Stephania zippeliana |

[0255] The amount of one or more alkaloid compounds can be increased or decreased in transgenic cells or tissues expressing a regulatory protein as described herein. An increase can be from about 1.5-fold to about 300-fold, or about 2-fold to about 22-fold, or about 50-fold to about 200-fold, or about 75-fold to about 130-fold, or about 5-fold to about 50-fold, or about 5-fold to about 10-fold, or about 10-fold to about 20-fold, or about 150-fold to about 200-fold, or about 20-fold to about 75-fold, or about 10-fold to about 100-fold, or about 40-fold to about 150-fold, about 100-fold to about 200-fold, about 150-fold to about 300-fold, or about 30-fold to about 50-fold higher than the amount in corresponding control cells or tissues that lack the recombinant nucleic acid encoding the regulatory protein.

[0256] In other embodiments, the alkaloid compound that is increased in transgenic cells or tissues expressing a regulatory protein as described herein is either not produced or is not detectable in corresponding control cells or tissues that lack the recombinant nucleic acid encoding the regulatory protein. Thus, in such embodiments, the increase in such an alkaloid compound is infinitely high as compared to corresponding control cells or tissues that lack the recombinant nucleic acid encoding the regulatory protein. For example, in certain cases, a regulatory protein described herein may activate a biosynthetic pathway in a plant that is not normally activated or operational in a control plant, and one or more new alkaloids that were not previously produced in that plant species can be produced.

[0257] The increase in amount of one or more alkaloids can be restricted in some embodiments to particular tissues and/or organs, relative to other tissues and/or organs. For example, a transgenic plant can have an increased amount of an alkaloid in leaf tissue relative to root or floral tissue.

[0258] In other embodiments, the amounts of one or more alkaloids are decreased in transgenic cells or tissues expressing a regulatory protein as described herein. A decrease ratio can be expressed as the ratio of the alkaloid in such a transgenic cell or tissue on a weight basis (e.g., fresh or freeze dried weight basis) as compared to the alkaloid in a corresponding control cell or tissue that lacks the recombinant nucleic acid encoding the regulatory protein. The decrease ratio can be from about 0.05 to about 0.90. In certain cases, the ratio can be from about 0.2 to about 0.6, or from about 0.4 to about 0.6, or from about 0.3 to about 0.5, or from about 0.2 to about 0.4.

[0259] In certain embodiments, the alkaloid compound that is decreased in transgenic cells or tissues expressing a regulatory protein as described herein is decreased to an undetectable level as compared to the level in corresponding control cells or tissues that lack the recombinant nucleic acid encoding the regulatory protein. Thus, in such embodiments, the decrease ratio in such an alkaloid compound is zero.

[0260] The decrease in amount of one or more alkaloids can be restricted in some embodiments to particular tissues and/or organs, relative to other tissues and/or organs. For example, a transgenic plant can have a decreased amount of an alkaloid in leaf tissue relative to root or floral tissue.

[0261] In some embodiments, the amounts of two or more alkaloids are increased and/or decreased, e.g., the amounts of two, three, four, five, six, seven, eight, nine, ten (or more) alkaloid compounds are independently increased and/or decreased. The amount of an alkaloid compound can be determined by known techniques, e.g., by extraction of alkaloid compounds followed by gas chromatography-mass spectrometry (GC-MS) or liquid chromatography-mass spectrometry (LC-MS). If desired, the structure of the alkaloid compound can be confirmed by GC-MS, LC-MS, nuclear magnetic resonance and/or other known techniques.

Methods of Screening for Associations and Modulating Expression of Sequences of Interest

[0262] Provided herein are methods of screening for novel regulatory region-regulatory protein association pairs. The described methods can thus determine whether or not a given regulatory protein can activate a given regulatory region (e.g., to modulate expression of a sequence of interest operably linked to the given regulatory region).

[0263] A method of determining whether or not a regulatory region is activated by a regulatory protein can include determining whether or not reporter activity is detected in a plant cell transformed with a recombinant nucleic acid construct comprising a test regulatory region operably linked to a nucleic acid encoding a polypeptide having the reporter activity and with a recombinant nucleic acid construct comprising a nucleic acid encoding a regulatory protein described herein. Detection of the reporter activity indicates that the test regulatory region is activated by the regulatory protein. In certain cases, the regulatory region is a regulatory region as described herein, e.g., comprising a nucleic acid sequence having 80% or greater sequence identity to a regulatory region as set forth in SEQ ID NOs:237-252.

[0264] For example, a plant can be made that is stably transformed with a sequence encoding a reporter operably linked to the regulatory region under investigation. The plant is inoculated with Agrobacterium containing a sequence encoding a regulatory protein on a Ti plasmid vector. A few days after inoculation, the plant tissue is examined for expression of the reporter, or for detection of reporter activity associated with the reporter. If reporter expression or activity is observed, it can be concluded that the regulatory protein increases transcription of the reporter coding sequence, such as by binding the regulatory region. A positive result indicates that expression of the regulatory protein being tested in a plant would be effective for increasing the in planta amount and/or rate of biosynthesis of one or more sequences of interest operably linked to the associated regulatory region.

[0265] Similarly, a method of determining whether or not a regulatory region is activated by a regulatory protein can include determining whether or not reporter activity is detected in a plant cell transformed with a recombinant nucleic acid construct comprising a regulatory region as described herein operably linked to a reporter nucleic acid, and with a recombinant nucleic acid construct comprising a nucleic acid encoding a test regulatory protein. Detection of reporter activity indicates that the regulatory region is activated by the test regulatory protein. In certain cases, the regulatory protein is a regulatory protein as described herein, e.g., comprising a polypeptide sequence having 80% or greater sequence identity to a polypeptide sequence set forth in any of SEQ ID NOs:2-5, SEQ ID NOs:7-16, SEQ ID NOs:18-33, SEQ ID NOs:35-42, SEQ ID NOs:44-61, SEQ ID NOs:63-70, SEQ ID NOs:72-79, SEQ ID NOs:81-86, SEQ ID NOs:88-99, SEQ ID NOs:101-113, SEQ ID NOs:115-122, SEQ ID NOs:124-136, SEQ ID NOs:138-150, SEQ ID NOs:152-156, SEQ ID NOs:158-167, SEQ ID NOs:169-175, SEQ ID NOs:177-188, SEQ ID NOs:190-191, SEQ ID NOs:193-194, SEQ ID NO:196, SEQ ID NO:198, SEQ ID NOs:200-204, SEQ ID NOs:206-215, SEQ ID NO:217, SEQ ID NO:219, SEQ ID NOs:221-236, or a consensus sequence set forth in FIGS. 1-22.

[0266] A transformation can be a transient transformation or a stable transformation, as discussed previously. The regulatory region and the nucleic acid encoding a test regulatory protein can be on the same or different nucleic acid constructs.

[0267] A reporter activity, such as an enzymatic or optical activity, can permit the detection of the presence of the reporter polypeptide in situ or in vivo, either directly or indirectly. For example, a reporter polypeptide can itself be bioluminescent upon exposure to light. As an alternative, a reporter polypeptide can catalyze a chemical reaction in vivo that yields a detectable product that is localized inside or that is associated with a cell that expresses the chimeric polypeptide. Exemplary bioluminescent reporter polypeptides that emit light in the presence of additional polypeptides, substrates or cofactors include firefly luciferase and bacterial luciferase. Bioluminescent reporter polypeptides that fluoresce in the absence of additional proteins, substrates or cofactors when exposed to light having a wavelength in the range of 300 nm to 600 nm include, for example: amFP486, Mutl5-amFP486, Mut32-amFP486, CNFP-MODCd1 and CNFP-MODCd2; asFP600, mutl-RNFP, NE-RNFP, d1RNFP and d2RNFP; cFP484, Δ19-cFP484 and Δ38-cFP484; dgFP512; dmFP592; drFP583, E5 drFP583, E8 drFP583, E5UP drFP583, E5down drFP583, E57 drFP583, AG4 drFP583 and AG4H drFP583; drFP583/dmFP592, drFP583/dmFP592-2G and drFP583/dmFP592-Q3; dsFP483; zFP506, N65M-zFP506, dlzFP506 and d2zFP506; zFP538, M128V-zFP538, YNFPM128V-MODCd1 and YNFPM128V-MODCd2; GFP; EGFP, ECFP, EYFP, EBFP, BFP2; d4EGFP, d2EGFP, and d1EGFP; and DsRed and DsRed1. See WO 00/34318; WO 00/34320; WO 00/34319; WO 00/34321; WO 00/34322; WO 00/34323; WO 00/34324; WO 00/34325; WO 00/34326; GenBank Accession No. AAB57606; Clontech User Manual, April 1999, PT2040-1, version PR94845; Li et al., J. Biol. Chem. 1998, 273:34970-5; U.S. Pat. No. 5,777,079; and Clontech User Manual, October 1999, PT34040-1, version PR9×217. Reporter polypeptides that catalyze a chemical reaction that yields a detectable product include, for example, β-galactosidase or β-glucuronidase. Other reporter enzymatic activities for use in the invention include neomycin phosphotransferase activity and phosphinotricin acetyl transferase activity.

[0268] In some cases, it is known that a particular transcription factor can activate transcription from a particular alkaloid regulatory region(s), e.g., a regulatory region involved in alkaloid biosynthesis. In these cases, similar methods can also be useful to screen other regulatory regions, such as other regulatory regions involved in alkaloid biosynthesis, to determine whether they are activated by the same transcription factor. Thus, the method can comprise transforming a plant cell with a nucleic acid comprising a test regulatory region operably linked to a nucleic acid encoding a polypeptide having reporter activity. The plant cell can include a recombinant nucleic acid encoding a regulatory protein operably linked to a regulatory region that drives transcription of the regulatory protein in the cell. If reporter activity is detected, it can be concluded that the regulatory protein activates transcription mediated by the test regulatory region.

[0269] Provided herein also are methods to modulate expression of sequences of interest. Modulation of expression can be expression itself, an increase in expression, or a decrease in expression. Such a method can involve transforming a plant cell with, or growing a plant cell comprising, at least one recombinant nucleic acid construct. A recombinant nucleic acid construct can include a regulatory region as described above, e.g., comprising a nucleic acid having 80% or greater sequence identity to a regulatory region set forth in SEQ ID NOs:237-252, where the regulatory region is operably linked to a nucleic acid encoding a sequence of interest. In some cases, a recombinant nucleic acid construct can further include a nucleic acid encoding a regulatory protein as described above, e.g., comprising a polypeptide sequence having 80% or greater sequence identity to a polypeptide sequence set forth in any of SEQ ID NOs:2-5, SEQ ID NOs:7-16, SEQ ID NOs:18-33, SEQ ID NOs:35-42, SEQ ID NOs:44-61, SEQ ID NOs:63-70, SEQ ID NOs:72-79, SEQ ID NOs:81-86, SEQ ID NOs:88-99, SEQ ID NOs:101-113, SEQ ID NOs:115-122, SEQ ID NOs:124-136, SEQ ID NOs:138-150, SEQ ID NOs:152-156, SEQ ID NOs:158-167, SEQ ID NOs:169-175, SEQ ID NOs:177-188, SEQ ID NOs:190-191, SEQ ID NOs:193-194, SEQ ID NO:196, SEQ ID NO:198, SEQ ID NOs:200-204, SEQ ID NOs:206-215, SEQ ID NO:217, SEQ ID NO:219, SEQ ID NOs:221-236, or a consensus sequence set forth in FIGS. 1-22. In other cases, the nucleic acid encoding the described regulatory protein is contained on a second recombinant nucleic acid construct. In either case, the regulatory region and the regulatory protein are associated, e.g., as shown in Table 4 (under Example 5 below) or as described herein (e.g., all orthologs of a regulatory protein are also considered to associate with the regulatory regions shown to associate with a given regulatory protein in Table 4, under Example 5 below). A plant cell is typically grown under conditions effective for the expression of the regulatory protein.

[0270] As will be recognized by those having ordinary skill in the art, knowledge of an associated regulatory region-regulatory protein pair can also be used to modulate expression of endogenous sequences of interest that are operably linked to endogenous regulatory regions. In such cases, a method of modulating expression of a sequence of interest includes transforming a plant cell that includes an endogenous regulatory region as described herein, with a recombinant nucleic acid construct comprising a nucleic acid encoding a regulatory protein as described herein, where the regulatory region and the regulatory protein are associated as indicated in Table 4 (under Example 5 below) and as described herein. Accordingly, an orthologous sequence and a polypeptide corresponding to the consensus sequence of a given regulatory protein would also be considered to be associated with the regulatory region shown in Table 4 (under Example 5 below) to be associated with the given regulatory protein. A method for expressing an endogenous sequence of interest can include growing such a plant cell under conditions effective for the expression of the regulatory protein. An endogenous sequence of interest can in certain cases be a nucleic acid encoding a polypeptide involved in alkaloid biosynthesis, such as an alkaloid biosynthesis enzyme or a regulatory protein involved in alkaloid biosynthesis.

[0271] In other cases, knowledge of an associated regulatory region-regulatory protein pair can be used to modulate expression of exogenous sequences of interest by endogenous regulatory proteins. Such a method can include transforming a plant cell that includes a nucleic acid encoding a regulatory protein as described herein, with a recombinant nucleic acid construct comprising a regulatory region described herein, where the regulatory region is operably linked to a sequence of interest, and where the regulatory region and the regulatory protein are associated as shown in Table 4 (under Example 5 below) and described herein. A method of expressing a sequence of interest can include growing such a plant cell under conditions effective for the expression of the endogenous regulatory protein.

[0272] Also provided are methods for producing one or more alkaloids. Such a method can include growing a plant cell that includes a nucleic acid encoding an exogenous regulatory protein as described herein and an endogenous regulatory region as described herein operably linked to a sequence of interest. The regulatory protein and regulatory region are associated, as described previously. A sequence of interest can encode a polypeptide involved in alkaloid biosynthesis. A plant cell can be from a plant capable of producing one or more alkaloids. The plant cell can be grown under conditions effective for the expression of the regulatory protein. The one or more alkaloids produced can be novel alkaloids, e.g., not normally produced in a wild-type plant cell.

[0273] Alternatively, a method for producing one or more alkaloids can include growing a plant cell that includes a nucleic acid encoding an endogenous regulatory protein as described herein and a nucleic acid including an exogenous regulatory region as described herein operably linked to a sequence of interest. A sequence of interest can encode a polypeptide involved in alkaloid biosynthesis. A plant cell can be grown under conditions effective for the expression of the regulatory protein. The one or more alkaloids produced can be novel alkaloids, e.g., not normally produced in a wild-type plant cell.

[0274] Provided herein also are methods for modulating (e.g., altering, increasing, or decreasing) the amounts of one or more alkaloids in a plant cell. The method can include growing a plant cell as described above, e.g., a plant cell that includes a nucleic acid encoding an endogenous or exogenous regulatory protein, where the regulatory protein associates with, respectively, an exogenous or endogenous regulatory region operably linked to a sequence of interest. In such cases, a sequence of interest can encode a polypeptide involved in alkaloid biosynthesis. Alternatively, a sequence of interest can result in a transcription product such as an antisense RNA or interfering RNA that affects alkaloid biosynthesis pathways, e.g., by modulating the steady-state level of mRNA transcripts available for translation that encode one or more alkaloid biosynthesis enzymes.

[0275] The invention will be further described in the following examples, which do not limit the scope of the invention described in the claims.

### EXAMPLES

### Example 1

### Generation of Arabidopsis Plants Containing Alkaloid Regulatory Region::Luciferase Constructs

[0276] T-DNA binary vector constructs were made using standard molecular biology techniques. A set of constructs were made that contained a luciferase coding sequence operably linked to one or two of the regulatory regions set forth in SEQ ID NO:237, SEQ ID NOs:239-247, SEQ ID NOs:249-250, and SEQ ID NO:252. Each of these constructs also contained a marker gene conferring resistance to the herbicide Finale®.

[0277] Each construct was introduced into Arabidopsis ecotype Wassilewskija (WS) by the floral dip method essentially as described in Bechtold et al., C.R. Acad. Sci. Paris, 316:1194-1199 (1993). The presence of each reporter region::luciferase construct was verified by PCR. At least two independent events from each transformation were selected for further study; these events were referred to as Arabidopsis thaliana screening lines. T₁ (first generation transformant) seeds were germinated and allowed to self-pollinate. T₂ (second generation, progeny of self-pollinated T₁ plants) seeds were collected and a portion were germinated and allowed to self-pollinate. T₃ (third generation, progeny of self-pollinated T₂ plants) seeds were collected.

### Example 2

### Screening of Regulatory Proteins in Arabidopsis

[0278] T₂ or T₃ seeds of the Arabidopsis thaliana screening lines described in Example 1 were planted in soil comprising Sunshine LP5 Mix and Thermorock Vermiculite Medium #3 at a ratio of 60:40, respectively. The seeds were stratified at 4° C. for approximately two to three days. After stratification, the seeds were transferred to the greenhouse and covered with a plastic dome and tarp until most of the seeds had germinated. Plants were grown under long day conditions. Approximately seven to ten days post-germination, plants were sprayed with Finale® herbicide to confirm that the plants were transgenic. Between three to four weeks after germination, the plants were used for screening.

[0279] T-DNA binary vector constructs comprising a CaMV ³⁵S constitutive promoter operably linked to one of the regulatory protein coding sequences listed in Table 4 (under Example 5 below) were made and transformed into Agrobacterium. One colony from each transformation was selected and maintained as a glycerol stock. Two days before the experiment commenced, each transformant was inoculated into 150 μL of YEB broth containing 100 μg/mL spectinomycin, 50 μg/mL rifampicin, and 20 μM acetosyringone; grown in an incubator-shaker at 28° C.; and harvested by centrifugation at 4,000 rpm for at least 25 minutes. The supernatant was discarded, and each pellet was resuspended in a solution of 10 mM MgCl; 10 mM MES, pH 5.7; and 150 μM acetosyringone to an optical density (OD₆₀₀) of approximately 0.05 to 0.1. Each suspension was transferred to a 1 mL syringe outfitted with a 30 gauge needle.

[0280] Plants were infected by mildly wounding the surface of a leaf using the tip of a syringe/needle containing a suspension of one of the Agrobacterium transformants. A small droplet of the Agrobacterium suspension was placed on the wound area after wounding. Each leaf was wounded approximately 10 times at different positions on the same leaf. Each leaf was wounded using one Agrobacterium transformant. The syringe needle preferably did not pierce through the leaf to increase the likelihood of Agrobacterium infection on the wounded site. Treated leaves were left attached to the mother plant for at least 5 days prior to analysis.

### Example 3

### Screening of Regulatory Proteins in Nicotiana

[0281] Stable Nicotiana tabacum screening lines, cultivar Samsun, were generated by transforming Nicotiana leaf explants with the T-DNA binary vector containing regulatory region and luciferase reporter construct as described in Example 1, following the transformation protocol essentially described by Rogers, S. G. et al., Methods in Enzymology 118:627 (1987). Leaf disks were cut from leaves of the screening lines using a paper puncher and were transiently infected with Agrobacterium clones prepared as described in Example 2. In addition, leaf disks from wild-type Nicotiana tabacum plants, cultivar SR1, were transiently infected with Agrobacterium containing a binary vector comprising a CaMV 35S constitutive promoter operably linked to a luciferase reporter coding sequence. These leaf disks were used as positive controls to indicate that the method of Agrobacterium infection was working. Some leaf disks from Nicotiana screening plants were transiently infected with Agrobacterium containing a binary construct of a CaMV ³⁵S constitutive promoter operably linked to a GFP coding sequence. These leaf disks served as reference controls to indicate that the luciferase reporter activity in the treated disks was not merely a response to treatment with Agrobacterium.

[0282] Transient infection was performed by immersing the leaf disks in about 5 to 10 mL of a suspension of Agrobacterium culture, prepared as described in Example 2, for about 2 min. Treated leaf disks were briefly and quickly blot-dried in tissue paper and then transferred to a plate lined with paper towels sufficiently wet with 1× MS solution (adjusted to pH 5.7 with 1 N KOH and supplemented with 1 mg/L BAP and 0.25 mg/L NAA). The leaf disks were incubated in a growth chamber under long-day light/dark cycle at 22° C. for 5 days prior to analysis.

### Example 4

### Co-infection Experiments in Nicotiana

[0283] In some cases, a mixture of two different Agrobacterium cultures were used in transient co-infection experiments in wild-type Nicotiana plants. One of the Agrobacterium cultures contained a vector comprising a regulatory region of interest operably linked to a luciferase reporter gene, and the other contained a vector that included the CaMV 35S constitutive promoter operably linked to a nucleotide sequence that coded for a regulatory factor of interest. The Agrobacterium culture and suspension were prepared as described in Example 2. The two different Agrobacterium suspensions were mixed to a final optical density (OD₆₀₀) of approximately 0.1 to 0.5. The mixture was loaded into a 1 mL syringe with a 30 gauge needle.

[0284] Depending on the size of a Nicotiana leaf, it can be divided arbitrarily into several sectors, with each sector accommodating one type of Agrobacterium mixture. Transient infection of a wild-type tobacco leaf sector was done by mildly wounding the surface of a leaf using the tip of a syringe/needle containing a mixture of Agrobacterium culture suspensions. A small droplet of the Agrobacterium suspension was placed on the wound area after wounding. Each leaf sector was wounded approximately 20 times at different positions within the same leaf sector. Treated Nicotiana leaves were left intact and attached to the mother plant for at least 5 days prior to analysis. A leaf sector treated with Agrobacterium that contained a binary construct including a CaMV 35 S constitutive promoter operably linked to a GFP coding sequence was used as a reference control.

### Example 5

### Luciferase Assay and Results

[0285] Treated intact leaves from Examples 2 and 4, and leaf disks from Example 3, were collected five days after infection and placed in a square Petri dish. Each leaf was sprayed with 10 μM luciferin in 0.01% Triton X-100. Leaves were then incubated in the dark for at least a minute prior to imaging with a Night Owl™ CCD camera from Berthold Technology. The exposure time depended on the screening line being tested; in most cases the exposure time was between 2 to 5 minutes. Qualitative scoring of luciferase reporter activity from each infected leaf was done by visual inspection and comparison of images, taking into account the following criteria: (1) if the luminescence signal was higher in the treated leaf than in the 35S-GFP-treated reference control (considered the background activity of the regulatory region), and (2) if the #1 criterion occurred in at least two independent transformation events carrying the regulatory region-luciferase reporter construct. Results of the visual inspection were noted according to the rating system given in Table 3, and with respect to both the positive and negative controls.

TABLE 3
Luciferase activity scoring system

| Score | Score Comment |
|---|---|
| ++ | signal in the treated leaf is much stronger than in reference |
| | background |
| + | signal in the treated leaf is stronger than in reference background |
| +/− | weak signal but still relatively higher than reference background |
| − | no response |

[0286] Alkaloid regulatory region/regulatory protein combinations that resulted in a score of +/−, + or ++ in both independent Arabidopsis transformation events were scored as having detectable luciferase reporter activity. Combinations that resulted in a score of +/−, + or ++ in one independent Arabidopsis transformation event were also scored as having detectable reporter activity if similar ratings were observed in the Nicotiana experiment. Combinations (also referred to as associations herein) having detectable luciferase reporter activity are shown in Table 4, below.

TABLE 4
Combinations of regulatory regions and regulatory proteins producing
expression of a reporter gene operably linked to each regulatory region

| | Regulatory | Regulatory | Regulatory | |
|---|---|---|---|---|
| Regulatory Region | Protein | Protein | Protein | |
| Construct | SEQ ID NO: | Gemini_ID | cDNA_ID | Screening Organism |
| AtCR2-L-AtROX6-L | 35 | 532E7 | 23360114 | Arabidopsis thaliana |
| | | | | and Tobacco |
| AtCR2-L-AtROX6-L | 44 | 532A7 | 23366941 | Arabidopsis thaliana |
| | | | | and Tobacco |
| AtCR2-L-AtROX6-L | 124 | 531F11 | 23401690 | Arabidopsis thaliana |
| | | | | and Tobacco |
| AtSS1-L-AtWDC-K | 193 | 5110E8 | 24365511 | Arabidopsis thaliana |
| AtSS3-L-AtROX7-L | 193 | 5110E8 | 24365511 | Arabidopsis thaliana |
| | | | | and Tobacco |
| AtSS3-L-AtROX7-L | 190 | 5110C8 | 23655935 | Arabidopsis thaliana |
| | | | | and Tobacco |
| AtSS3-L-AtROX7-L | 177 | 5110H5 | 23522373 | Arabidopsis thaliana |
| | | | | and Tobacco |
| AtSS3-L-AtROX7-L | 152 | 552G6 | 23419038 | Arabidopsis thaliana |
| | | | | and Tobacco |
| CrSS-L-AtSLS6-K | 2 | 531E4 | 23356923 | Arabidopsis thaliana |
| | | | | and Tobacco |
| EcBBE-L- | 115 | 531B3 | 23387900 | Arabidopsis thaliana |
| EcNMCH3-L | | | | and Tobacco |
| EcBBE-L- | 72 | 531D2 | 23383878 | Arabidopsis thaliana |
| EcNMCH3-L | | | | and Tobacco |
| EcBBE-L- | 7 | 531E7 | 23357249 | Arabidopsis thaliana |
| EcNMCH3-L | | | | and Tobacco |
| EcBBE-L- | 158 | 531H6 | 23427553 | Arabidopsis thaliana |
| EcNMCH3-L | | | | and Tobacco |
| EcBBE-L- | 88 | 532C5 | 23385649 | Arabidopsis thaliana |
| EcNMCH3-L | | | | and Tobacco |
| EcBBE-L- | 198 | 533D3 | 23462512 | Arabidopsis thaliana |
| EcNMCH3-L | | | | and Tobacco |
| EcBBE-L- | 169 | 531B1 | 23472397 | Arabidopsis thaliana |
| EcNMCH3-L | | | | and Tobacco |
| EcBBE-L- | 18 | 531H7 | 23358452 | Arabidopsis thaliana |
| EcNMCH3-L | | | | and Tobacco |
| EcBBE-L- | 196 | Zap1 | 23468313 | Arabidopsis thaliana |
| EcNMCH3-L | | | | and Tobacco |
| EcBBE-L- | 200 | 555A3 | 23377122 | Arabidopsis thaliana |
| EcNMCH3-L | | | | and Tobacco |
| EcBBE-L- | 221 | 555C4 | 23704869 | Arabidopsis thaliana |
| EcNMCH3-L | | | | and Tobacco |
| PsBBE-L | 138 | 531A3 | 23416527 | Tobacco |
| PsBBE-L | 81 | 533B1 | 23385144 | Tobacco |
| PsBBE-L | 101 | 532H5 | 23387851 | Tobacco |
| PsBBE-L | 124 | 531F11 | 23401690 | Tobacco |
| PsBBE-L | 206 | 555A1 | 23388445 | Tobacco |
| PsBBE-L | 200 | 555A3 | 23377122 | Tobacco |
| PsHMCOMT2-L | 101 | 532H5 | 23387851 | Tobacco |
| PsHMCOMT2-L | 63 | 532G5 | 23371050 | Tobacco |
| PsHMCOMT2-L | 190 | 5110C8 | 23655935 | Tobacco |
| PsHMCOMT2-L | 219 | 531H9 | 23447935 | Tobacco |
| PsHMCOMT2-L | 206 | 555A1 | 23388445 | Tobacco |
| PsROMT-L | 7 | 531E7 | 23357249 | Tobacco |
| PsROMT-L | 158 | 531H6 | 23427553 | Tobacco |
| PsROMT-L | 169 | 531B1 | 23472397 | Tobacco |
| PsROMT-L | 101 | 532H5 | 23387851 | Tobacco |
| PsROMT-L | 63 | 532G5 | 23371050 | Tobacco |
| PsROMT-L | 217 | 531G11 | 23395214 | Tobacco |
| PsROMT-L | 219 | 531H9 | 23447935 | Tobacco |
| PsROMT-L | 206 | 555A1 | 23388445 | Tobacco |
| PsROMT-L | 221 | 555C4 | 23704869 | Tobacco |

Legend:
L = Luciferase
K = Kanamycin (neomycin phosphotransferase)
AtCR2 = Arabidopsis putative codeinone reductase gene 2 promoter
AtROX6 = Arabidopsis putative reticuline oxidase gene 6 promoter
AtROX7 = Arabidopsis putative reticuline oxidase gene 7 promoter
CrSS = Catharanthus roseus strictosidine synthase gene promoter
AtSLS6 = Arabidopsis putative secologanin synthase gene 6 promoter
EcBBE = Eschscholzia californica berberine bridge enzyme gene promoter
EcNMCH3 = Eschscholzia californica N-methylcoclaurine 3′-hydroxylase gene promoter
AtSS1 = Arabidopsis putative strictosidine synthase gene 1 promoter
AtSS3 = Arabidopsis putative strictosidine synthase gene 3 promoter
AtWDC = Arabidopsis putative tryptophan decarboxylase gene promoter
PsBBE = Papaver somniferum berberine bridge enzyme promoter
PsHMCOMT2 = Papaver somniferum hydroxy N-methyl S-coclaurine 4-O-methyltransferase 2 gene promoter
PsROMT = Papaver somniferum (R, S)-reticuline 7-O-methyltransferase (PsROMT) gene promoter

### Example 6

### Transformation of Opium poppy and Analysis of Transcriptional Activation

[0287] Opium poppy (Papaver somniferum) was transformed with the eight cDNA clones and one genomic clone listed in Table 5, below. These clones were selected because they were able to activate alkaloid-related promoters in primary and secondary transactivation screens in Arabidopsis and tobacco. Transformation of Opium poppy was performed as described below.

TABLE 5
Regulatory proteins expressed in opium poppy plants

| Regulatory | Regulatory | Regulatory | |
|---|---|---|---|
| Protein | Protein | Protein | |
| Gemini_ID | SEQ ID NO: | Clone_ID | Type of Insert |
| Zap1 | 196 | Zap1 | At-genomic |
| 531E4 | 2 | 19578 | At-cDNA |
| 532E7 | 35 | 34363 | At-cDNA |
| 532A7 | 44 | 18663 | At-cDNA |
| 531A3 | 138 | 1007869 | At-cDNA |
| 531B1 | 169 | 251343 | At-cDNA |
| 531H6 | 158 | 40501 | At-cDNA |
| 532G5 | 63 | 250132 | At-cDNA |
| 531F11 | 124 | 603410 | Gm-cDNA |

Ex-Plant Preparation and Embryogenic Callus Induction

[0288] Seed sterilization and germination:

[0289] Seeds of Papaver somniferum cv. Bea's Choice (Source: The Basement Shaman, Woodstock, IL) were surface-sterilized in 20% Clorox (commercial bleach) plus 0.1% Liqui-Nox (surfactant) for 20 min. and rinsed 3 times with sterile MilliQH₂O. Seeds were allowed to germinate in Germination Medium (GM; ½ strength of MS basal salts supplemented with B5 vitamins, 1.5% sucrose and 4 g/L Phytagar, pH 5.7) in Magenta boxes by incubating in Percival growth chamber with 16 hr/8 hr light/dark photo period at 25° C.

[0290] Preparation of embryogenic callus highly competent for transformation:

[0291] Hypocotyls, roots, and young leaves of 10 to 20 day old seedlings were cut and placed on Callus Induction Medium (CIM; MS basal medium with B5 vitamins, 1 g/L Casamino acid, 2 mg/L 2,4 D, 0.5 mg/L BA, and 6.5 g/L Phytagar) and incubated at low light at 25° C. in Percival growth chamber. Callus was initiated from the cut surface of the explants within 20 days. Callus was subcultured onto fresh CIM. Thereafter, subculture was done every 10 to 15 days. After 2-3 subcultures compact light yellow to white spherical embryogenic callus (EC) usually emerged from the surface of translucent friable non-embryogenic callus (NEC). EC was separated from NEC and subcultured in CIM every 10 to 12 days.

Transformation

[0292] Preparation of Agrobacterium:

[0293] Agrobacterium contained a T-DNA construct using the binary vector CRS338 with a DNA insert corresponding to a clone listed in Table 5 above driven by a CaMV 35S promoter. The T-DNA also contained a synthetic gene encoding phosphinotricin-acetyltransferase under the control of 28716 promoter (gDNA ID: 7418782). The Agrobacterium was then inoculated into 2 mL of YEB liquid medium with appropriate antibiotics and incubated overnight at 28° C. with appropriate shaking. Agrobacterium cells were spun down at 10,000 rpm in 1.5 mL Eppendorf tube at room temperature (RT) using a micro-centrifuge. Cells were resuspended in 6 mL of liquid co-cultivation medium (liquid CCM=CM with 100 μM Acetosyringone) in 50 mL conical tube to get a final OD₆₀₀ of 0.06-0.08.

[0294] Transfection of EC:

[0295] Approximately 0.5 to 1 gram of EC was infected with Agrobacterium suspension for 5 min with gentle agitation. Transfected EC was blotted-dry with sterile Kimwipe paper in a Petri plate before transfer on top of sterile Whatman filter paper contained in co-cultivation Medium (CCM). Transfected EC was incubated at 22° C. under low light in Percival growth chamber for 3 days for co-cultivation.

[0296] Callus Recovery:

[0297] Transfected EC were washed 3 times with 20-30 mL of sterile MilliQ-H₂O with moderate shaking. The last wash was done in the presence of 500 mg/L Carbenicillin. Washed EC was briefly dried in sterile Kimwipe paper prior to transfer in Recovery Medium (RRM=CIM+500 mg/L carbenicillin). Transfected EC was incubated at 25° C. under low light in Percival growth chamber for 7-9 days.

[0298] Selection for Transformed Calli:

[0299] After the recovery period, all calli were transferred to Callus Selection Medium (CSM=CM+500 mg/L carbenicillin+5 mg/L bialaphos) and incubated at 25° C. under low light in Percival growth chamber. Subculture of transfected EC was done every 10 to 12 days. After the second subculture, only bialaphos resistant calli were transferred to fresh CSM. The resistant embryogenic calli typically had light yellow color. Non-resistant calli typically were light to dark brown in color and were dead or dying.

[0300] Regeneration:

[0301] After 3 subcultures, bialaphos resistant calli were transferred to Regeneration Medium 1 (RM1=CM+250 mg/L carbenicillin+2 mg/L Zeatin+0.05 mg/L IBA+100 mg/L L-Glutamine+200 mg/L L-Cysteine) and incubated at 25° C. under high light in Percival growth chamber with 16 hr photo period.

[0302] After 10-15 days, bialaphos resistant calli were transferred to Regeneration Medium 2 (RM2=CM+250 mg/L carbenicillin+0.5 mg/L Zeatin+0.05 mg/L IBA+100 mg/L L-Glutamine+200 mg/L L-Cysteine). Bialaphos resistant EC will continue to grow and differentiate into embryos. These embryos developed into plantlets after 15-20 days.

[0303] Small plantlets with roots were transferred to Rooting Medium (RtM=CM+250 mg/L carbenicillin+0.2 mg/L IBA+50 mg/L L-Glutamine+4 g/L Phytagar) in sterile Sundae Cup.

[0304] Fully-regenerated plants are transferred to soil at appropriate time.

Protocol for qRT-PCR Analysis

[0305] In most cases, five (5) independent transgenic events for each TF clone were used for qRT-PCR analysis. In a few cases, three independent events were used. Tissues collected from wild-type and transgenic lines were of two types: callus and embryogenic callus. The control for transgenic regular callus was the corresponding wild-type regular callus. Similarly, the control for the transgenic embryogenic callus was the wild-type embryogenic tissue. The difference between the two tissue types is morphological, i.e., the presence of embryo-like structures surrounded by callus cells.

[0306] Total RNA was isolated from the tissue samples using Trizol Reagent (Invitrogen). RNA was converted to cDNA using the reagents included in the iScript kit (BioRad). Quantitative RT-PCR was performed using BioRad iCycler reagents and iCycler PCR machine.

[0307] Opium poppy CAB (chlorophyll-a/b binding protein) gene was used to normalize the expression of different alkaloid-related genes in the samples. The expression level of CAB gene appeared to be similar in all wild-type and transgenic tissues analyzed. The extent of transcription of the transgenes relative to non-transgenic wild-type was calculated to a certain degree using any measurable threshold cycle (Ct). If there was no measurable Ct, the samples were given an arbitrary, conservative estimate number of 35 to have an estimate of the expression relative to wild type.

[0308] Aside from the transcription of the corresponding transgene, the transcription of the genes listed in Table 6, below, was monitored for each of the transgenic events using the corresponding set of primers, also shown below (Table 7).

TABLE 6
Genes monitored for transcription in transgenic opium poppy plants

| Gene Code | Identity |
|---|---|
| CR | Codeinone reductase (EC 1.1.1.247) |
| BBE | Berberine bridge enzyme (EC 1.21.3.3) |
| HMCOMT1 | S-adenosyl-L-methionine:3′-hydroxy-N-methylcoclaurine |
| | 4′-O-methyltransferase 1 (EC 2.1.1.116) |
| HMCOMT2 | S-adenosyl-L-methionine:3′-hydroxy-N-methylcoclaurine |
| | 4′-O-methyltransferase 2 (EC 2.1.1.116) |
| NOMT | (R,S)-norcoclaurine 6-O-methyltransferase |
| | (EC 2.1.1.128) |
| ROMT | (R,S)-reticuline 7-O-methyltransferase |
| SAT | Salutaridinol 7-O-acetyltransferase (EC 2.3.1.150) |
| YDC (or TYD) | Tyrosine decarboxylase (EC 4.1.1.25) |

[0309] TABLE 7

Primers used to monitor gene expression in
transgenic opium poppy plants

| | | SEQ | | SEQ |
|---|---|---|---|---|
| | | ID | | ID |
| Gene Name | Sense Primer | NO: | Anti-sense Primer | NO: |
| PsBBE | AAACGTGTTTAGACATGCATTAGA | 331 | CCTCCGAAACCATTTAGAGCTATA | 332 |
| PsCR | TTACTGCATACTCGCCTTTGG | 333 | AGATTTTCCTCTGACCTGGGA | 334 |
| PsSAT | GGTAAAATGTGTGAGTTCATGTCG | 335 | AACGATCACCAGTGCTTCCTT | 336 |
| PsHMCOMT1 | TTGGTGAATACAGGTGGTAGAGA | 337 | GCGAATCGGTCTGATCTTATGA | 338 |
| PsHMCOMT2 | AAAACAATGATGGGGCAATCAC | 339 | GGTGTACCAAGTATCTTACCATTC | 340 |
| PsROMT | TACAACAATAATCAACGAGATGCT | 341 | TAACTATTTCAGCGATTATCGACC | 342 |
| PsNOMT | ATGGCTTGTGATACTAGATTGGTT | 343 | GCTTTAGATATGGCTTTCACTGC | 344 |
| PsYDC | GTTTCTATGTGCTACTGTGGGTAC | 345 | GCCTGAACTCCGGGCAAA | 346 |
| At-531F11 | GCCAGCACGCAAACTTCAG | 347 | GCTTGAGGTGGTGTTAGAATTGTT | 348 |
| At-531E4 | ATCTCATTCACCGACGCAGAAG | 349 | CGGCGAGTCTGGGATGCT | 350 |
| At-532G5 | CGAGCCACGGAGGAACAA | 351 | CCCCTCTCGTTGATGAGGAA | 352 |
| At-531A3 | ATTACAGAGGAGTGAGGCAGAGA | 353 | CGCATCCTAAAAGCAGCTATATCG | 354 |
| At-532E7 | GCTGCACAGTATGGAGTTCTC | 355 | CCCTTGATCCTGACAGCTCTAA | 356 |
| At-532A7 | TTCTGCCAAAAGTGTTGTGCTA | 357 | TGTTGAGTCTTCCAGTTGTTGTAA | 358 |
| At-531H6 | AAGAAGCTAATCCACTGGCATG | 359 | CGATGGTTGGTAATGTGAATTGTT | 360 |
| At-Zap | CAAACAAAGATCACGCAGCCA | 361 | TGCCTTCTCTTGACAAACAGTG | 362 |
| PsCAB | AAGAATGGTAGACTTGCTATGTTG | 363 | ATGTTGCAGTGACCAGGATC | 364 |

Summary of the qRT-PCR Results

[0310] The values for each gene shown in Table 8, below, are normalized to CAB gene expression for each of the transformation events relative to the averaged value of non-transgenic wild-type.

TABLE 8
qRT-PCR results

| Gemini | Clone | | | | | | | | | |
|---|---|---|---|---|---|---|---|---|---|---|
| ID | ID | Tissue Line | CR | BBE | HMCOMT1 | HMCOMT2 | NOMT | ROMT | SAT | YDC |
| Zap | Zap | Average | 8.46 | 9.10 | 4.69 | 1.11 | 1.25 | 0.05 | 0.55 | 3.68 |
| | | Callus Line1 | 8.22 | 5.10 | 4.79 | 4.79 | 0.71 | 0.11 | 0.57 | 4.08 |
| | | Callus Line2 | 16.45 | 25.11 | 4.96 | 4.96 | 2.08 | 0.19 | 1.80 | 9.06 |
| | | Callus Line3 | 10.48 | 5.28 | 5.31 | 5.31 | 1.08 | 0.05 | 0.28 | 4.69 |
| | | Callus Line4 | 6.92 | 9.19 | 7.01 | 7.01 | 2.16 | 0.02 | 0.97 | 1.84 |
| | | Callus Line5 | 8.22 | 0.84 | 2.57 | 2.57 | 0.88 | 0.02 | 0.18 | 2.11 |
| Zap | Zap | Average | 64.60 | Not | 0.02 | 149.09 | 66.72 | 0.19 | 8.94 | 0.93 |
| | | | | performed | | | | | | |
| | | Embryonic | 162.02 | Not | 0.00 | 1009.90 | 421.68 | 1.32 | 69.55 | 3.92 |
| | | Line1 | | performed | | | | | | |
| | | Embryonic | 15.35 | Not | 0.19 | 89.26 | 25.46 | 0.73 | 4.66 | 0.14 |
| | | Line2 | | performed | | | | | | |
| | | Embryonic | 16.45 | Not | 0.04 | 36.25 | 22.94 | 1.37 | 2.17 | 1.54 |
| | | Line3 | | performed | | | | | | |
| 531E4 | 19578 | Average | 4.98 | 6.08 | 7.73 | 1.02 | 0.78 | 0.28 | 0.42 | 23.51 |
| | | Callus Line1 | 11.08 | 13.93 | 18.51 | 3.53 | 2.39 | 0.50 | 0.62 | 140.07 |
| | | Callus Line2 | 3.18 | 6.06 | 4.96 | 0.69 | 0.66 | 0.27 | 0.28 | 18.13 |
| | | Callus Line3 | 4.99 | 2.64 | 4.96 | 1.25 | 0.74 | 0.14 | 0.55 | 29.45 |
| | | Callus Line4 | 0.65 | 1.68 | 7.78 | 0.36 | 0.32 | 0.35 | 0.34 | 4.08 |
| 532E7 | 34363 | Average | 1.98 | 1.48 | 1.39 | 2.73 | 3.94 | 1.20 | 0.70 | 1.92 |
| | | Embryonic | 0.18 | 1.13 | 1.44 | 0.83 | 1.01 | 1.41 | 0.51 | 3.07 |
| | | Line1 | | | | | | | | |
| | | Embryonic | 6.92 | 3.18 | 1.30 | 7.89 | 30.27 | 1.37 | 0.82 | 2.87 |
| | | Line2 | | | | | | | | |
| | | Embryonic | 1.40 | 0.80 | 1.17 | 3.43 | 3.66 | 0.81 | 0.67 | 1.21 |
| | | Line3 | | | | | | | | |
| | | Embryonic | 0.68 | 1.05 | 1.17 | 1.39 | 3.41 | 0.81 | 0.88 | 1.59 |
| | | Line4 | | | | | | | | |
| | | Embryonic | 0.73 | 1.25 | 2.04 | 4.86 | 2.50 | 1.93 | 0.69 | 1.54 |
| | | Line5 | | | | | | | | |
| 532A7 | 18663 | Average | 13.77 | 11.07 | 1.54 | 39.40 | 43.11 | 1.37 | 1.75 | 5.43 |
| | | Embryonic | 28.64 | 19.97 | 2.35 | 160.90 | 210.84 | 1.27 | 1.39 | 9.00 |
| | | Line1 | | | | | | | | |
| | | Embryonic | 20.25 | 22.94 | 1.30 | 106.15 | 159.79 | 1.46 | 5.17 | 7.31 |
| | | Line2 | | | | | | | | |
| | | Embryonic | 14.32 | 6.82 | 1.17 | 63.12 | 44.32 | 0.84 | 3.92 | 10.34 |
| | | Line3 | | | | | | | | |
| | | Embryonic | 3.71 | 3.18 | 2.27 | 9.71 | 10.70 | 1.87 | 0.72 | 2.87 |
| | | Line4 | | | | | | | | |
| | | Embryonic | 1.92 | 2.41 | 1.06 | 9.06 | 9.32 | 1.62 | 0.82 | 2.41 |
| | | Line5 | | | | | | | | |
| 531A3 | 1007869 | Average | 12.75 | 6.67 | 1.06 | 16.34 | 38.32 | 1.61 | 1.36 | 19.03 |
| | | Embryonic | 5.43 | 3.66 | 1.16 | 25.63 | 27.28 | 1.74 | 1.16 | 16.22 |
| | | Line1 | | | | | | | | |
| | | Embryonic | 32.90 | 9.32 | 1.72 | 9.71 | 20.68 | 0.90 | 1.21 | 91.77 |
| | | Line2 | | | | | | | | |
| | | Embryonic | 9.13 | 7.84 | 1.21 | 35.02 | 45.89 | 1.15 | 1.65 | 18.00 |
| | | Line3 | | | | | | | | |
| | | Embryonic | 2.45 | 1.09 | 0.51 | 3.43 | 16.80 | 2.55 | 0.82 | 6.59 |
| | | Line4 | | | | | | | | |
| | | Embryonic | 13.83 | 11.47 | 1.55 | 38.85 | 194.01 | 2.38 | 2.41 | 14.12 |
| | | Line5 | | | | | | | | |
| 531B1 | 251343 | Average | 19.48 | 5.86 | 1.17 | 2.22 | 1.72 | 1.04 | 0.62 | 4.00 |
| | | Callus Line1 | 41.36 | 11.71 | 2.31 | 8.40 | 5.31 | 5.82 | 3.14 | 18.13 |
| | | Callus Line2 | 14.12 | 2.93 | 0.60 | 1.34 | 4.63 | 5.82 | 0.47 | 14.72 |
| | | Callus Line3 | 2.97 | 2.93 | 1.16 | 0.98 | 0.20 | 0.03 | 0.16 | 0.24 |
| 531H6 | 40501 | Average | 19.62 | 24.10 | 1.51 | 42.52 | 111.43 | 0.65 | 2.17 | 3.61 |
| | | Embryonic | 24.08 | 31.78 | 1.17 | 41.64 | 95.01 | 1.00 | 2.25 | 4.50 |
| | | Line1 | | | | | | | | |
| | | Embryonic | 40.50 | 35.26 | 1.44 | 198.09 | 177.29 | 0.23 | 7.84 | 8.40 |
| | | Line2 | | | | | | | | |
| | | Embryonic | 7.67 | 24.93 | 1.91 | 51.27 | 50.91 | 0.57 | 2.77 | 4.50 |
| | | Line3 | | | | | | | | |
| | | Embryonic | 6.23 | 4.41 | 1.60 | 7.89 | 15.14 | 1.37 | 0.46 | 1.01 |
| | | Line4 | | | | | | | | |
| 532G5 | 250132 | Average | 21.01 | 12.85 | 1.09 | 38.05 | 60.13 | 0.81 | 3.34 | 3.25 |
| | | Embryonic | 28.64 | 10.85 | 1.26 | 47.84 | 69.55 | 1.41 | 3.78 | 5.54 |
| | | Line1 | | | | | | | | |
| | | Embryonic | 3.12 | 1.99 | 0.80 | 4.86 | 10.34 | 1.32 | 0.77 | 1.71 |
| | | Line2 | | | | | | | | |
| | | Embryonic | 29.65 | 21.71 | 1.26 | 95.67 | 139.10 | 0.90 | 8.11 | 3.78 |
| | | Line3 | | | | | | | | |
| | | Embryonic | 19.56 | 15.89 | 1.26 | 63.12 | 101.83 | 0.55 | 4.50 | 3.41 |
| | | Line4 | | | | | | | | |
| | | Embryonic | 24.08 | 13.83 | 0.95 | 56.89 | 77.17 | 0.45 | 3.92 | 2.97 |
| | | Line5 | | | | | | | | |
| 531F11 | 603410 | Average | 10.06 | 27.76 | 0.86 | 49.87 | 92.41 | 0.31 | 3.89 | 1.68 |
| | | Embryonic | 8.22 | 34.06 | 0.95 | 95.67 | 154.34 | 0.15 | 7.06 | 0.82 |
| | | Line1 | | | | | | | | |
| | | Embryonic | 16.45 | 51.63 | 1.60 | 145.01 | 134.36 | 0.34 | 4.50 | 2.33 |
| | | Line2 | | | | | | | | |
| | | Embryonic | 10.48 | 15.35 | 1.13 | 27.47 | 50.91 | 1.15 | 3.07 | 3.07 |
| | | Line3 | | | | | | | | |
| | | Embryonic | 6.92 | 32.90 | 0.44 | 75.06 | 154.34 | 0.04 | 3.41 | 0.62 |
| | | Line4 | | | | | | | | |
| | | Embryonic | 8.22 | 4.89 | 0.61 | 10.78 | 41.36 | 1.32 | 2.68 | 3.66 |
| | | Line5 | | | | | | | | |

[0311] Six of the nine regulatory protein clones tested were able to transcriptionally activate at least two genes that belong to the isoquinoline/morphinan biosynthetic pathways in opium poppy. These clones correspond to Zap, 531A3, 532G5, 532A7, 531H6, and 531F11. In all of the six cases, the transactivated genes are the HMCOMT2 [S-adenosyl-L-methionine. 3′-hydroxy-N-methylcoclaurine 4′-O-methyltransferase 2] and NOMT [(R,S)-norcoclaurine 6-O-methyltransferase]. Depending on the transformation event, the transcription of these genes is increased between 10× to 1000×. In some cases, expression of CR (codeinone reductase) and BBE (berberine bridge enzyme) genes are also enhanced by at least 10- to 162-fold.

[0312] It is interesting to highlight that the effect of the Zap gene on transcriptional transactivation is manifested differently depending on the developmental state of the tissue. Transactivation is greater in embryogenic tissue than in the callus. This implies that in callus, transcriptional repression of alkaloid-related genes possibly exists and that 35S-driven overexpression of a positive regulator like a TF may not be enough to bring the transcriptional transactivation of relevant genes to a level present in embryogenic tissues.

### Example 7

### Transformation of California Poppy and Chemical Analysis for Alkaloids

[0313] California poppy (Eszcholtzia californica) was transformed with the ten cDNA clones and one genomic clone listed in Table 9, below:

TABLE 9
Regulatory proteins expressed in California poppy plants

| Gemini ID | SEQ ID NO: | Clone ID | Type of insert |
|---|---|---|---|
| 531E4 | 2 | 19578 | At-cDNA |
| 532E7 | 35 | 34363 | At-cDNA |
| 532A7 | 44 | 18663 | At-cDNA |
| 531A3 | 138 | 1007869 | At-cDNA |
| 531B1 | 169 | 251343 | At-cDNA |
| 532H5 | 101 | 251466 | At-cDNA |
| 532G5 | 63 | 250132 | At-cDNA |
| 531F11 | 124 | 603410 | Gm-cDNA |
| 533B1 | 81 | 111598 | At-cDNA |
| 531H7 | 18 | 16204 | At-cDNA |
| Zap | 196 | Zap | At-genomic |

[0314] The clones listed in Table 9, above, were selected because they were able to activate alkaloid-related promoters in primary and secondary transactivation screens in Arabidopsis and tobacco. Transformation of California poppy was performed essentially following the procedures published by Park and Facchini, 1999 (Plant Cell Rep 19: 421-426) and 2000 (Plant Cell Rep 19: 1006-1012).

Chemical Analysis of Alkaloid Production in California Poppy:

[0315] Tissues from at least three independent transformation events per clone were used. Twenty mg freeze-dried California poppy callus tissue was extracted in methanol using a sonicator for 4 hours. Reserpine was included during extraction to serve as internal standard. The crude extract was clarified using a syringe filter and the resulting methanol filtrate was analyzed using LC-MS. LC-MS analysis was performed on the resuspended methanol extract using Waters-Micromass ZMD (single quadrupole, benchtop MS detector with positive electrospray ionization). The area of the signature peaks from LC-MS data for known alkaloid intermediate was normalized to the internal standard.

[0316] LC-MS conditions:

[0317] A gradient of 20% to 95% acetonitrile (in 0.1% formic acid) for 55 min. followed by a 5 min. isocratic run in 95% acetonitrile (in 0.1% formic acid) using an Alltima C 18 column (5 μm; 150×4.6 mm).

[0318] Summary of Chemical Analysis for Selected Benzophenanthridine Alkaloids in California poppy

[0319] The values shown in Table 10, below, indicate the fold-increase or fold-decrease in the amount of selected alkaloids for each transgenic plant relative to average values of the non-transgenic wild-type.

TABLE 10
Fold change in benzophenanthridine alkaloids in transgenic California poppy plants

| | | | Fold Increase or Decrease in the Amount of Indicated Alkaloid Intermediate | | | | | | |
|---|---|---|---|---|---|---|---|---|---|
| | | Trans- | Relative to Non-transgenic Wild-type | | | | | | |
| | | for- | | | 12- | 10- | | | |
| | Gemini | mation | | Dihydroxy- | hydroxy- | hydroxy- | Dihydro- | Dihydro- | Dihydro- |
| Clone ID | ID | Event # | Sanguinarine | dihydrosanguinarine | dihydrochelirubine | dihydrosanguinarine | macarpine | chelirubine | sanguinarine |
| 25143 | 531B1 | Event 1 | 3.53 | 0.02 | 0.00 | 2.60 | 0.17 | 0.05 | 2.73 |
| | | Event 2 | 2.38 | 0.31 | 0.19 | 7.00 | 1.35 | 0.53 | 10.18 |
| | | Event 3 | 2.41 | 0.64 | 0.55 | 65.32 | 1.80 | 0.97 | 35.55 |
| 1007869 | 531A3 | Event 1 | 3.76 | 0.87 | 0.58 | 29.31 | 2.21 | 2.32 | 40.74 |
| | | Event 2 | 3.81 | 2.15 | 12.63 | 135.74 | 1.57 | 3.44 | 105.05 |
| | | Event 3 | 3.63 | 0.95 | 1.52 | 100.84 | 1.69 | 1.75 | 144.73 |
| 16204 | 531H7 | Event 2 | 2.76 | 0.51 | 0.27 | 24.76 | 0.00 | 0.45 | 116.06 |
| | | Event 3 | 2.55 | 0.77 | 0.18 | 52.53 | 3.73 | 0.60 | 63.76 |
| 111598 | 533B1 | Event 1 | 2.10 | 3.32 | 13.75 | 183.83 | 3.16 | 2.63 | 102.49 |
| | | Event 2 | 2.25 | 1.18 | 0.94 | 79.54 | 0.67 | 1.18 | 128.44 |
| | | Event 3 | 2.48 | 1.26 | 0.25 | 85.09 | 3.15 | 0.88 | 37.63 |
| 19578 | 531E4 | Event 1 | 2.23 | 0.29 | 0.12 | 19.89 | 0.40 | 0.21 | 9.09 |
| | | Event 2 | 0.98 | 0.26 | 0.12 | 73.99 | 4.55 | 0.57 | 74.64 |
| | | Event 3 | 1.13 | 0.28 | 0.16 | 31.51 | 0.80 | 0.26 | 30.90 |
| 18663 | 532A7 | Event 1 | 1.06 | 0.29 | 0.21 | 46.24 | 5.37 | 0.42 | 124.64 |
| 251466 | 532H5 | Event 1 | 1.83 | 0.71 | 0.40 | 25.30 | 2.41 | 1.47 | 33.10 |
| | | Event 2 | 1.91 | 0.70 | 0.96 | 22.21 | 1.19 | 1.59 | 14.74 |
| | | Event 3 | 1.70 | 0.34 | 0.20 | 7.92 | 0.67 | 1.72 | 12.73 |
| 34363 | 532E7 | Event 1 | 1.51 | 0.20 | 0.37 | 12.55 | 1.68 | 1.63 | 13.29 |
| | | Event 2 | 2.02 | 0.35 | 0.34 | 33.84 | 3.21 | 2.50 | 30.10 |
| | | Event 3 | 1.75 | 0.69 | 4.96 | 40.36 | 1.06 | 2.95 | 22.42 |
| 603410 | 531F11 | Event 1 | 0.88 | 0.56 | 0.16 | 0.67 | 0.24 | 0.94 | 1.40 |
| | | Event 2 | 0.65 | 0.34 | 0.71 | 1.92 | 0.39 | 3.61 | 0.81 |
| | | Event 3 | 0.74 | 0.67 | 8.24 | 0.78 | 0.50 | 1.86 | 4.27 |
| 250132 | 532G5 | Event 1 | 1.42 | 0.71 | 0.91 | 5.52 | 3.00 | 1.44 | 27.86 |
| | | Event 2 | 0.93 | 0.48 | 0.18 | 1.52 | 2.12 | 0.83 | 35.05 |
| | | Event 3 | 1.16 | 0.60 | 0.55 | 13.15 | 2.73 | 1.13 | 50.62 |
| Zap | Zap | Event 1 | 0.42 | 2.72 | 2.27 | 23.82 | 1.14 | 0.37 | 11.29 |
| | | Event 2 | 0.94 | 6.23 | 4.22 | 2.00 | 1.17 | 1.92 | 0.95 |
| | | Event 3 | 1.00 | 4.33 | 3.30 | 34.88 | 2.03 | 0.56 | 30.26 |
| | | Event 4 | 3.15 | 4.16 | 0.53 | 6.03 | 1.33 | 0.83 | 2.75 |

[0320] Nine of the 11 regulatory protein clones tested were able to significantly increase the production of some of the benzophenanthridine alkaloid intermediates in California poppy plants. These clones were Zap, 531A3, 531H7, 533B1, 531E4, 532A7, 532H5, 532E7, and 532G5. Depending on the intermediate, the extent of the increase was between 2-fold and 183-fold. Most of the benzophenanthridine alkaloid intermediates that were substantially increased were sanguinarine and its derivatives 10-hydroxy-dihydrosanguinarine and dihydrosanguinarine.

### Example 8

### Chemical Analysis of Transgenic Opium Poppy Plants for Alkaloids

[0321] Rosette leaves from transgenic Opium poppy lines containing selected regulatory factors from the transactivation screen were analyzed. Leaf samples were collected from pre-flowering plants (first generation transgenic lines) and were immediately frozen in liquid nitrogen. Samples were lyophilized prior to analysis.

LC-MS analysis:

[0322] Freeze-dried samples were extracted using methanol as solvent with sonication for 30 min. with shaking. An internal standard (either reserpine or oxycodone) was included during extraction. Analysis of morphinan alkaloids was performed using an LC-MS Ion Trap (Thermo-Finnigan) with a step gradient mobile phase of 5% to 100% methanol for 60 min. Retention times of signature ions for alkaloid intermediates were checked against reference standards. Areas of the peaks corresponding to the signature ions were integrated using the software programs associated with the LC-MS system. The areas of the alkaloid peaks were divided by the area of the peak corresponding to the internal standard. Peak areas relative to the internal standard are listed in columns 3 to 5 of Table 11 below. These values were divided by the average values from the wild-type to calculate the normalized values listed in columns 6 to 8 of Table 11 below. Normalized values of 1.5 or greater are highlighted in bold.

TABLE 11
Fold change in morphinan alkaloids in transgenic opium poppy plants

| | | Morphine | Codeine Peak | Thebaine | Normalized | Normalized | Normalized |
|---|---|---|---|---|---|---|---|
| | Plant Line Event | Peak Area | Area | Peak Area | Morphine | Codeine | Thebaine |
| Gemini ID | Code | (Relative to Internal Std) | | | (Peak Area/WT Average) | | |
| 531A3 | Ps-531A3-1-04 | 3.307 | 0.564 | 7.581 | 0.686 | 1.120 | 1.046 |
| | Ps-531A3-2-01 | 3.467 | 0.377 | 2.552 | 0.719 | 0.749 | 0.352 |
| | Ps-531A3-2-03 | 1.577 | 0.196 | 2.206 | 0.327 | 0.388 | 0.304 |
| | Ps-531A3-2-04 | 4.369 | 0.299 | 3.318 | 0.906 | 0.594 | 0.458 |
| | Ps-531A3-2-05 | 2.563 | 0.280 | 11.382 | 0.532 | 0.556 | 1.571 |
| | Ps-531A3-2-07 | 3.352 | 0.062 | 0.467 | 0.695 | 0.122 | 0.064 |
| | Ps-531A3-6-01 | 5.286 | 0.336 | 8.660 | 1.096 | 0.667 | 1.195 |
| | Ps-531A3-6-02 | 3.386 | 0.686 | 13.582 | 0.702 | 1.363 | 1.874 |
| | Ps-531A3-6-03 | 3.889 | 0.474 | 4.363 | 0.807 | 0.941 | 0.602 |
| | Ps-531A3-6-04 | 5.283 | 0.570 | 20.956 | 1.096 | 1.132 | 2.892 |
| | Ps-531A3-6-07 | 3.366 | 0.409 | 1.758 | 0.698 | 0.812 | 0.243 |
| | Ps-531A3-6-08 | 5.947 | 0.596 | 8.459 | 1.234 | 1.184 | 1.167 |
| 531E4 | Ps-531E4-4-01 | 2.814 | 0.550 | 7.239 | 0.584 | 1.092 | 0.999 |
| | Ps-531E4-4-03 | 2.785 | 0.357 | 1.632 | 0.578 | 0.709 | 0.225 |
| | Ps-531E4-4-04 | 4.275 | 0.479 | 6.966 | 0.887 | 0.950 | 0.961 |
| | Ps-531E4-4-05 | 4.176 | 0.458 | 6.148 | 0.866 | 0.909 | 0.848 |
| | Ps-531E4-4-09 | 3.008 | 0.431 | 3.923 | 0.624 | 0.855 | 0.541 |
| 531F11 | Ps-531F11-1-01 | 0.933 | 0.339 | 0.490 | 0.194 | 0.673 | 0.068 |
| | Ps-531F11-2-01 | 2.164 | 0.177 | 6.028 | 0.449 | 0.351 | 0.832 |
| | Ps-531F11-2-03 | 6.569 | 0.728 | 9.308 | 1.363 | 1.445 | 1.284 |
| | Ps-531F11-2-04 | 4.100 | 0.286 | 6.518 | 0.850 | 0.568 | 0.899 |
| | Ps-531F11-2-05 | 2.708 | 0.310 | 1.668 | 0.562 | 0.616 | 0.230 |
| | Ps-531F11-3-01 | 3.952 | 0.475 | 9.788 | 0.820 | 0.943 | 1.351 |
| | Ps-531F11-3-03 | 3.794 | 0.722 | 4.106 | 0.787 | 1.434 | 0.567 |
| | Ps-531F11-3-05 | 4.906 | 0.546 | 13.788 | 1.018 | 1.084 | 1.903 |
| | Ps-531F11-6-02 | 1.591 | 0.520 | 34.951 | 0.330 | 1.032 | 4.823 |
| | Ps-531F11-6-03 | 3.719 | 0.157 | 0.379 | 0.771 | 0.312 | 0.052 |
| | Ps-531F11-6-04 | 3.782 | 0.381 | 2.921 | 0.784 | 0.756 | 0.403 |
| | Ps-531F11-6-06 | 4.366 | 0.513 | 2.058 | 0.906 | 1.019 | 0.284 |
| 531H6 | Ps-531H6-1-02 | 2.538 | 0.331 | 3.260 | 0.526 | 0.657 | 0.450 |
| | Ps-531H6-1-04 | 0.679 | 0.840 | 26.468 | 0.141 | 1.668 | 3.652 |
| | Ps-531H6-3-01 | 1.923 | 0.239 | 1.882 | 0.399 | 0.475 | 0.260 |
| | Ps-531H6-3-02 | 3.874 | 0.233 | 13.239 | 0.803 | 0.462 | 1.827 |
| | Ps-531H6-4-02 | 3.560 | 0.330 | 20.288 | 0.738 | 0.655 | 2.800 |
| | Ps-531H6-4-03 | 2.316 | 0.438 | 12.670 | 0.480 | 0.869 | 1.748 |
| | Ps-531H6-4-04 | 2.886 | 0.399 | 1.293 | 0.599 | 0.792 | 0.178 |
| | Ps-531H6-4-06 | 2.763 | 0.554 | 8.698 | 0.573 | 1.101 | 1.200 |
| | Ps-531H6-5-03 | 2.811 | 0.261 | 1.469 | 0.583 | 0.518 | 0.203 |
| | Ps-531H6-6-01 | 4.576 | 0.215 | 4.846 | 0.949 | 0.426 | 0.669 |
| | Ps-531H6-6-02 | 2.724 | 0.165 | 1.388 | 0.565 | 0.327 | 0.192 |
| | Ps-531H6-6-03 | 5.376 | 0.417 | 7.319 | 1.115 | 0.828 | 1.010 |
| | Ps-531H6-6-04 | 3.155 | 0.497 | 0.737 | 0.654 | 0.986 | 0.102 |
| | Ps-531H6-6-05 | 4.116 | 0.760 | 9.580 | 0.854 | 1.509 | 1.322 |
| 532A7 | Ps-532A7-10-01 | 5.878 | 0.460 | 11.130 | 1.219 | 0.914 | 1.536 |
| | Ps-532A7-10-02 | 5.637 | 0.935 | 19.229 | 1.169 | 1.857 | 2.653 |
| | Ps-532A7-10-05 | 3.968 | 0.171 | 2.044 | 0.823 | 0.340 | 0.282 |
| | Ps-532A7-2-01 | 3.356 | 0.239 | 1.229 | 0.696 | 0.475 | 0.170 |
| | Ps-532A7-3-05 | 6.047 | 0.362 | 11.154 | 1.254 | 0.718 | 1.539 |
| 532E7 | Ps-532E7-2-03 | 9.846 | 0.077 | 0.377 | 2.042 | 0.153 | 0.052 |
| | Ps-532E7-3-03 | 3.091 | 0.620 | 8.993 | 0.641 | 1.231 | 1.241 |
| | Ps-532E7-4-02 | 8.206 | 2.308 | 23.385 | 1.702 | 4.582 | 3.227 |
| | Ps-532E7-4-06 | 7.522 | 0.972 | 12.665 | 1.560 | 1.930 | 1.748 |
| | Ps-532E7-7-01 | 3.778 | 0.596 | 26.885 | 0.784 | 1.184 | 3.710 |
| 532G5 | Ps-532G5-3-02 | 1.166 | 0.675 | 9.948 | 0.242 | 1.340 | 1.373 |
| | Ps-532G5-4-01 | 1.547 | 0.772 | 2.692 | 0.321 | 1.533 | 0.371 |
| | Ps-532G5-4-02 | 3.725 | 0.916 | 4.939 | 0.773 | 1.818 | 0.681 |
| | Ps-532G5-4-03 | 2.774 | 0.427 | 2.387 | 0.575 | 0.849 | 0.329 |
| | Ps-532G5-4-04 | 1.681 | 0.565 | 8.744 | 0.349 | 1.121 | 1.207 |
| | Ps-532G5-6-01 | 1.370 | 0.589 | 5.140 | 0.284 | 1.170 | 0.709 |
| | Ps-532G5-6-02 | 1.726 | 0.264 | 0.317 | 0.358 | 0.525 | 0.044 |
| Zap1 | Ps-Zap-2-02 | 5.359 | 0.260 | 32.042 | 1.112 | 0.517 | 4.421 |
| | Ps-Zap-3-02 | 3.149 | 0.497 | 16.780 | 0.653 | 0.987 | 2.315 |
| | Ps-Zap-3-04 | 3.975 | 0.335 | 11.842 | 0.825 | 0.665 | 1.634 |
| | Ps-Zap-4-01 | 3.670 | 0.524 | 13.268 | 0.761 | 1.040 | 1.831 |
| | Ps-Zap-4-04 | 2.080 | 0.197 | 20.363 | 0.431 | 0.391 | 2.810 |
| Wild Type | Ps-WT-01 | 5.342 | 0.437 | 10.361 | | | |
| | Ps-WT-02 | 4.211 | 0.595 | 6.891 | | | |
| | Ps-WT-03 | 4.910 | 0.479 | 4.489 | | | |
| | Ps-WT (Average) | 4.821 | 0.504 | 7.247 | 1.000 | 1.000 | 1.000 |

### Example 9

### Determination of Functional Homolog and/or Ortholog Sequences

[0323] A subject sequence was considered a functional homolog or ortholog of a query sequence if the subject and query sequences encoded proteins having a similar function and/or activity. A process known as Reciprocal BLAST (Rivera et al., Proc. Natl. Acad. Sci. USA, 95:6239-6244 (1998)) was used to identify potential functional homolog and/or ortholog sequences from databases consisting of all available public and proprietary peptide sequences, including NR from NCBI and peptide translations from Ceres clones.

[0324] Before starting a Reciprocal BLAST process, a specific query polypeptide was searched against all peptides from its source species using BLAST in order to identify polypeptides having sequence identity of 80% or greater to the query polypeptide and an alignment length of 85% or greater along the shorter sequence in the alignment. The query polypeptide and any of the aforementioned identified polypeptides were designated as a cluster.

[0325] The main Reciprocal BLAST process consists of two rounds of BLAST searches; forward search and reverse search. In the forward search step, a query polypeptide sequence, “polypeptide A,” from source species SA was BLASTed against all protein sequences from a species of interest. Top hits were determined using an E-value cutoff of 10-5 and an identity cutoff of 35%. Among the top hits, the sequence having the lowest E-value was designated as the best hit, and considered a potential functional homolog or ortholog. Any other top hit that had a sequence identity of 80% or greater to the best hit or to the original query polypeptide was considered a potential functional homolog or ortholog as well. This process was repeated for all species of interest.

[0326] In the reverse search round, the top hits identified in the forward search from all species were BLASTed against all protein sequences from the source species SA. A top hit from the forward search that returned a polypeptide from the aforementioned cluster as its best hit was also considered as a potential functional homolog or ortholog.

[0327] Functional homologs and/or orthologs were identified by manual inspection of potential functional homolog and/or ortholog sequences. Representative functional homologs and/or orthologs for SEQ ID NO:2, SEQ ID NO:7, SEQ ID NO:18, SEQ ID NO:35, SEQ ID NO:44, SEQ ID NO:63, SEQ ID NO:72, SEQ ID NO:81, SEQ ID NO:88, SEQ ID NO:101, SEQ ID NO:115, SEQ ID NO:124, SEQ ID NO:138, SEQ ID NO:152, SEQ ID NO:158, SEQ ID NO:169, SEQ ID NO:177, SEQ ID NO:190, SEQ ID NO:193, SEQ ID NO:200, SEQ ID NO:206, and SEQ ID NO:221 are shown in FIGS. 1-22, respectively. The percent identities of functional homologs and/or orthologs to SEQ ID NO:2, SEQ ID NO:7, SEQ ID NO:18, SEQ ID NO:35, SEQ ID NO:44, SEQ ID NO:63, SEQ ID NO:72, SEQ ID NO:81, SEQ ID NO:88, SEQ ID NO:101, SEQ ID NO:115, SEQ ID NO:124, SEQ ID NO:138, SEQ ID NO:152, SEQ ID NO:158, SEQ ID NO:169, SEQ ID NO:177, SEQ ID NO:190, SEQ ID NO:193, SEQ ID NO:200, SEQ ID NO:206, and SEQ ID NO:221 are shown below in Tables 12-33, respectively.

TABLE 12
Percent identity to Ceres cDNA ID 23356923 (SEQ ID NO: 2)

| | | SEQ ID | | |
|---|---|---|---|---|
| Designation | Species | NO: | % Identity | e-value |
| Public GI no. 51970702 | Arabidopsis | 3 | 98.7 | 4.50E−81 |
| | thaliana | | | |
| Ceres CLONE ID no. | Brassica | 4 | 81.8 | 1.59E−51 |
| 871060 | napus | | | |
| Ceres CLONE ID no. | Brassica | 5 | 78.9 | 4.49E−49 |
| 1069147 | napus | | | |

[0328] TABLE 13
Percent identity to Ceres cDNA ID 23357249 (SEQ ID NO: 7)

| | | SEQ ID | % | |
|---|---|---|---|---|
| Designation | Species | NO: | Identity | e-value |
| Ceres CLONE ID no. | Zea mays | 8 | 75.3 | 5.19E−48 |
| 1388283 | | | | |
| Public GI no. 1778374 | Pisum sativum | 9 | 66.9 | 2.70E−42 |
| Public GI no. 7439995 | Nicotiana | 10 | 66.6 | 5.19E−39 |
| | sylvestris | | | |
| Public GI no. 7489099 | Nicotiana | 11 | 65.8 | 7.10E−35 |
| | sylvestris | | | |
| Public GI no. 34906972 | Oryza sativa | 12 | 64.6 | 1.59E−35 |
| | subsp. japonica | | | |
| Ceres CLONE ID no. | Glycine max | 13 | 61.6 | 1.80E−38 |
| 536457 | | | | |
| Ceres CLONE ID no. | Glycine max | 14 | 61 | 7.49E−40 |
| 744170 | | | | |
| Ceres CLONE ID no. | Triticum | 15 | 60.4 | 1.70E−39 |
| 579861 | aestivum | | | |
| Public GI no. 21388662 | Physcomitrella | 16 | 54.4 | 1.79E−29 |
| | patens | | | |

[0329] TABLE 14
Percent identity to Ceres cDNA ID 23358452 (SEQ ID NO: 18)

| | | SEQ ID | % | |
|---|---|---|---|---|
| Designation | Species | NO: | Identity | e-value |
| Ceres CLONE ID no. | Brassica | 19 | 65.3 | 5.70E−42 |
| 873113 | napus | | | |
| Ceres CLONE ID no. | Brassica | 20 | 64.5 | 2.70E−42 |
| 956177 | napus | | | |
| Ceres CLONE ID no. | Glycine max | 21 | 52.4 | 8.99E−28 |
| 721511 | | | | |
| Ceres CLONE ID no. | Glycine max | 22 | 52.4 | 8.99E−28 |
| 641329 | | | | |
| Ceres CLONE ID no. | Glycine max | 23 | 51.6 | 1.90E−27 |
| 782784 | | | | |
| Public GI no. 18645 | Glycine max | 24 | 51.6 | 1.90E−27 |
| Public GI no. 1052956 | Ipomoea nil | 25 | 48.7 | 1.19E−23 |
| Public GI no. 436424 | Pisum | 26 | 48 | 1.70E−26 |
| | sativum | | | |
| Public GI no. 2894109 | Solanum | 27 | 47.6 | 1.09E−22 |
| | tuberosum | | | |
| Ceres CLONE ID no. | Triticum | 28 | 46.8 | 4.69E−22 |
| 686294 | aestivum | | | |
| Public GI no. 50726318 | Oryza sativa | 29 | 45.6 | 3.19E−23 |
| | subsp. | | | |
| | japonica | | | |
| Public GI no. 729737 | Vicia faba | 30 | 44 | 3.60E−24 |
| Public GI no. 729736 | Ipomoea nil | 31 | 43.5 | 1.09E−22 |
| Ceres CLONE ID no. | Zea mays | 32 | 43 | 2.49E−23 |
| 1060767 | | | | |
| Public GI no. 7446231 | Canavalia | 33 | 42.8 | 2.00E−23 |
| | gladiata | | | |

[0330] TABLE 15
Percent identity to Ceres cDNA ID 23360114 (SEQ ID NO: 35)

| | | SEQ ID | % | |
|---|---|---|---|---|
| Designation | Species | NO: | Identity | e-value |
| Ceres CLONE ID no. | Zea mays | 36 | 87.8 | 6.60E−103 |
| 1382382 | | | | |
| Ceres CLONE ID no. | Zea mays | 37 | 61.5 | 4.20E−53 |
| 1561543 | | | | |
| Public GI no. 51964362 | Oryza sativa subsp. | 38 | 59.5 | 2.10E−60 |
| | japonica | | | |
| Ceres CLONE ID no. | Glycine max | 39 | 57.3 | 1.90E−57 |
| 557109 | | | | |
| Public GI no. 50912679 | Oryza sativa subsp. japonica | 40 | 56.9 | 2.10E−42 |
| Public GI no. 51535177 | Oryza sativa subsp. | 41 | 52.6 | 1.20E−46 |
| | japonica | | | |
| Ceres CLONE ID no. | Triticum aestivum | 42 | 35.2 | 8.20E−34 |
| 888753 | | | | |

[0331] TABLE 16
Percent identity to Ceres cDNA ID 23366941 (SEQ ID NO: 44)

| Designation | Species | SEQ ID NO: | % Identity | e-value |
|---|---|---|---|---|
| Public GI no. 12324817 | Arabidopsis thaliana | 45 | 98.75 | 1.79E−45 |
| Public GI no. 55584076 | Pelargonium zonale | 46 | 69.3 | 9.99E−36 |
| Ceres CLONE ID no. | Zea mays | 47 | 68.3 | 7.60E−31 |
| 303971 | | | | |
| Ceres CLONE ID no. | Zea mays | 48 | 68.3 | 9.69E−31 |
| 1633647 | | | | |
| Ceres CLONE ID no. | Zea mays | 49 | 68.3 | 7.60E−31 |
| 314456 | | | | |
| Public GI no. 16516825 | Petunia x hybrida | 50 | 65.3 | 3.89E−34 |
| Ceres CLONE ID no. | Triticum aestivum | 51 | 65 | 4.99E−34 |
| 780025 | | | | |
| Ceres CLONE ID no. | Triticum aestivum | 52 | 65 | 4.99E−34 |
| 1000657 | | | | |
| Public GI no. 16516823 | Petunia x hybrida | 53 | 64.3 | 1.70E−33 |
| Public GI no. 2982285 | Picea mariana | 54 | 64.3 | 1.79E−31 |
| Ceres CLONE ID no. | Brassica napus | 55 | 64.3 | 5.80E−33 |
| 963426 | | | | |
| Ceres CLONE ID no. | Glycine max | 56 | 64 | 2.79E−33 |
| 682557 | | | | |
| Ceres CLONE ID no. | Glycine max | 57 | 63.3 | 3.09E−34 |
| 646744 | | | | |
| Public GI no. 59042581 | Pelargonium zonale | 58 | 63.2 | 9.69E−31 |
| Ceres CLONE ID no. | Glycine max | 59 | 63 | 2.20E−33 |
| 602368 | | | | |
| Ceres CLONE ID no. | Glycine max | 60 | 61.3 | 2.39E−34 |
| 566082 | | | | |
| Ceres CLONE ID no. | Brassica napus | 61 | 58 | 6.59E−32 |
| 1114184 | | | | |

[0332] TABLE 17
Percent identity to Ceres cDNA ID 23371050 (SEQ ID NO: 63)

| | | | % | |
|---|---|---|---|---|
| Designation | Species | SEQ ID NO: | Identity | e-value |
| Ceres CLONE ID no. | Brassica napus | 64 | 65 | 2.40E−50 |
| 962327 | | | | |
| Ceres CLONE ID no. | Glycine max | 65 | 54.9 | 5.39E−37 |
| 1101577 | | | | |
| Ceres CLONE ID no. | Triticum aestivum | 66 | 49.6 | 4.09E−32 |
| 634261 | | | | |
| Public GI no. 5031281 | Prunus armeniaca | 67 | 47 | 3.79E−29 |
| Public GI no. 35187687 | Oryza sativa subsp. indica | 68 | 38.7 | 3.60E−31 |
| Public GI no. 34978689 | Oryza sativa subsp. | 69 | 51.3 | 2.20E−33 |
| | japonica | | | |
| Public GI no. 34909836 | Oryza sativa subsp. | 70 | 41.67 | 5.19E−06 |
| | japonica | | | |

[0333] TABLE 18
Percent identity to Ceres cDNA ID 23383878 (SEQ ID NO: 72)

| Designation | Species | SEQ ID NO: | % Identity | e-value |
|---|---|---|---|---|
| Ceres CLONE ID no. | Arabidopsis thaliana | 73 | 98.3 | 6.99E−28 |
| 94850 | | | | |
| Public GI no. 21689807 | Arabidopsis thaliana | 74 | 98.1 | 8.80E−53 |
| Public GI no. 18391322 | Arabidopsis thaliana | 75 | 97.8 | 5.79E−40 |
| Ceres CLONE ID no. | Arabidopsis thaliana | 76 | 97.7 | 1.10E−40 |
| 17426 | | | | |
| Ceres CLONE ID no. | Arabidopsis thaliana | 77 | 97.6 | 2.30E−38 |
| 11593 | | | | |
| Ceres CLONE ID no. | Brassica napus | 78 | 81.4 | 1.40E−31 |
| 1087844 | | | | |
| Ceres CLONE ID no. | Brassica napus | 79 | 79.6 | 1.19E−34 |
| 963628 | | | | |

[0334] TABLE 19
Percent identity to Ceres cDNA ID 23385144 (SEQ ID NO: 81)

| Designation | Species | SEQ ID NO: | % Identity | e-value |
|---|---|---|---|---|
| Ceres CLONE ID no. | Glycine max | 82 | 96.53 | 0 |
| 473126 | | | | |
| Public GI no. 54287494 | Oryza sativa subsp. | 83 | 95.37 | 3.39E−130 |
| | japonica | | | |
| Ceres CLONE ID no. | Zea mays | 84 | 95.37 | 2.60E−130 |
| 238614 | | | | |
| Public GI no. 34903124 | Oryza sativa subsp. | 85 | 94.98 | 1.39E−129 |
| | japonica | | | |
| Public GI no. 53791918 | Oryza sativa subsp. | 86 | 67.18 | 4.99E−88 |
| | japonica | | | |

[0335] TABLE 20
Percent identity to Ceres cDNA ID 23385649 (SEQ ID NO: 88)

| | | | % | |
|---|---|---|---|---|
| Designation | Species | SEQ ID NO: | Identity | e-value |
| Ceres CLONE ID no. | Glycine max | 89 | 50.3 | 1.20E−32 |
| 474636 | | | | |
| Ceres CLONE ID no. | Glycine max | 90 | 51.8 | 3.19E−32 |
| 1057375 | | | | |
| Ceres CLONE ID no. | Glycine max | 91 | 48.8 | 4.09E−32 |
| 1027534 | | | | |
| Public GI no. 1632831 | Ricinus communis | 92 | 51.8 | 5.80E−33 |
| Public GI no. 5669634 | Lycopersicon esculentum | 93 | 68.2 | 4.80E−45 |
| Public GI no. 8895787 | Solanum tuberosum | 94 | 49.6 | 5.19E−32 |
| Ceres CLONE ID no. | Triticum aestivum | 95 | 60.4 | 3.29E−37 |
| 638899 | | | | |
| Ceres CLONE ID no. | Zea mays | 96 | 63.1 | 6.89E−37 |
| 348434 | | | | |
| Ceres CLONE ID no. | Parthenium argentatum | 97 | 67.6 | 3.49E−42 |
| 1607224 | | | | |
| Public GI no. 50725389 | Oryza sativa subsp. | 98 | 61.9 | 2.59E−37 |
| | japonica | | | |
| Public GI no. 19225065 | Retama raetam | 99 | 75.1 | 9.09E−51 |

[0336] TABLE 21
Percent identity to Ceres cDNA ID 23387851 (SEQ ID NO: 101)

| | | | % | |
|---|---|---|---|---|
| Designation | Species | SEQ ID NO: | Identity | e-value |
| Public GI no. 50253268 | Oryza sativa subsp. | 102 | 43.57 | 5.20E−22 |
| | japonica | | | |
| Public GI no. 45826359 | Lycopersicon esculentum | 103 | 38.46 | 5.70E−16 |
| Public GI no. 45826360 | Lycopersicon esculentum | 104 | 36.23 | 1.20E−15 |
| Public GI no. 37993864 | Gossypium hirsutum | 105 | 38.17 | 1.89E−15 |
| Ceres CLONE ID no. | Glycine max | 106 | 51.67 | 2.59E−20 |
| 707775 | | | | |
| Public GI no. 38257023 | Cucumis melo | 107 | 53.39 | 6.89E−20 |
| Public GI no. 37147896 | Capsicum annuum | 108 | 31.85 | 3.99E−15 |
| Public GI no. 41351817 | Thellungiella salsuginea | 109 | 37.3 | 2.50E−15 |
| Public GI no. 55824656 | Glycine soja | 110 | 34.06 | 3.20E−15 |
| Public GI no. 66269671 | Hevea brasiliensis | 111 | 52.1 | 2.29E−15 |
| Public GI no. 33638194 | Oryza sativa | 112 | 42.4 | 6.39E−17 |
| Public GI no. 21908034 | Zea mays | 113 | 41.43 | 1.30E−18 |

[0337] TABLE 22
Percent identity to Ceres cDNA ID 23387900 (SEQ ID NO: 115)

| Designation | Species | SEQ ID NO: | % Identity | e-value |
|---|---|---|---|---|
| Ceres CLONE ID no. | Arabidopsis thaliana | 116 | 98.3 | 2.90E−61 |
| 118184 | | | | |
| Ceres CLONE ID no. | Arabidopsis thaliana | 117 | 98 | 2.50E−55 |
| 118878 | | | | |
| Ceres CLONE ID no. | Arabidopsis thaliana | 118 | 97.5 | 4.00E−64 |
| 3929 | | | | |
| Ceres CLONE ID no. | Arabidopsis thaliana | 119 | 95 | 7.99E−59 |
| 12459 | | | | |
| Ceres CLONE ID no. | Arabidopsis thaliana | 120 | 94.1 | 3.50E−58 |
| 1354021 | | | | |
| Public GI no. 30017217 | Arabidopsis thaliana | 121 | 94.1 | 3.50E−58 |
| Ceres CLONE ID no. | Arabidopsis thaliana | 122 | 91.4 | 1.80E−54 |
| 109026 | | | | |

[0338] TABLE 23
Percent identity to Ceres cDNA ID 23401690 (SEQ ID NO: 124)

| Designation | Species | SEQ ID NO: | % Identity | e-value |
|---|---|---|---|---|
| Ceres CLONE ID no. | Glycine max | 125 | 65.5 | 5.69E−49 |
| 605218 | | | | |
| Public GI no. 57012759 | Nicotiana tabacum | 126 | 64.3 | 1.79E−29 |
| Ceres CLONE ID no. | Arabidopsis thaliana | 127 | 63.9 | 2.40E−27 |
| 6397 | | | | |
| Ceres CLONE ID no. | Zea mays | 128 | 62.2 | 1.90E−25 |
| 282666 | | | | |
| Public GI no. 32401273 | Mesembryanthemum | 129 | 59.5 | 1.79E−30 |
| | crystallinum | | | |
| Ceres CLONE ID no. | Glycine max | 130 | 55.6 | 4.80E−45 |
| 592713 | | | | |
| Public GI no. 3342211 | Lycopersicon esculentum | 131 | 53.5 | 6.09E−29 |
| Public GI no. 57012876 | Nicotiana sylvestris | 132 | 52.8 | 8.70E−30 |
| Ceres CLONE ID no. | Triticum aestivum | 133 | 52.2 | 5.69E−26 |
| 555364 | | | | |
| Ceres CLONE ID no. | Brassica napus | 134 | 52.2 | 1.49E−25 |
| 944101 | | | | |
| Ceres CLONE ID no. | Triticum aestivum | 135 | 51.1 | 1.19E−25 |
| 569593 | | | | |
| Public GI no. 50927517 | Oryza sativa subsp. | 136 | 47.3 | 1.90E−25 |
| | japonica | | | |

[0339] TABLE 24
Percent identity to Ceres cDNA ID 23416527 (SEQ ID NO: 138)

| Designation | Species | SEQ ID NO: | % Identity | e-value |
|---|---|---|---|---|
| Public GI no. 14140141 | Oryza sativa | 139 | 48.92 | 7.00E−36 |
| Public GI no. 56567585 | Oryza sativa subsp. | 140 | 48.92 | 7.00E−36 |
| | japonica | | | |
| Public GI no. 17385636 | Matricaria chamomilla | 141 | 53.41 | 1.60E−36 |
| Public GI no. 50927517 | Oryza sativa subsp. | 142 | 64.8 | 1.70E−35 |
| | japonica | | | |
| Public GI no. 32401273 | Mesembryanthemum | 143 | 59.68 | 9.89E−44 |
| | crystallinum | | | |
| Public GI no. 3342211 | Lycopersicon esculentum | 144 | 55.87 | 4.90E−42 |
| Ceres CLONE ID no. | Glycine max | 145 | 44.94 | 6.79E−29 |
| 605218 | | | | |
| Public GI no. 57012759 | Nicotiana tabacum | 146 | 58.5 | 2.79E−40 |
| Public GI no. 57012876 | Nicotiana sylvestris | 147 | 53.51 | 5.09E−40 |
| Ceres CLONE ID no. | Zea mays | 148 | 51.91 | 1.09E−35 |
| 398626 | | | | |
| Ceres CLONE ID no. | Triticum aestivum | 149 | 47.85 | 8.10E−33 |
| 569593 | | | | |
| Ceres CLONE ID no. | Triticum aestivum | 150 | 48.39 | 4.30E−34 |
| 555364 | | | | |

[0340] TABLE 25
Percent identity to Ceres cDNA ID 23419038 (SEQ ID NO: 152)

| | | SEQ ID | | |
|---|---|---|---|---|
| Designation | Species | NO: | % Identity | e-value |
| Ceres CLONE ID no. | Glycine max | 153 | 59.5 | 2.80E−17 |
| 473902 | | | | |
| Ceres CLONE ID no. | Zea mays | 154 | 54 | 2.00E−23 |
| 1469452 | | | | |
| Public GI no. 41351817 | Thellungiella | 155 | 44.6 | 3.40E−12 |
| | salsuginea | | | |
| Public GI no. 33324520 | Gossypium | 156 | 41.7 | 4.49E−17 |
| | hirsutum | | | |

[0341] TABLE 26
Percent identity to Ceres cDNA ID 23427553 (SEQ ID NO: 158)

| | | SEQ ID | | |
|---|---|---|---|---|
| Designation | Species | NO: | % Identity | e-value |
| Ceres CLONE ID no. | Brassica | 159 | 66.6 | 1.39E−84 |
| 956457 | napus | | | |
| Ceres CLONE ID no. | Glycine max | 160 | 59.8 | 3.70E−70 |
| 1172789 | | | | |
| Ceres CLONE ID no. | Glycine max | 161 | 58.3 | 2.69E−67 |
| 480785 | | | | |
| Ceres CLONE ID no. | Triticum | 162 | 57.2 | 1.10E−61 |
| 859154 | aestivum | | | |
| Ceres CLONE ID no. | Zea mays | 163 | 55.6 | 8.39E−64 |
| 407007 | | | | |
| Public GI no. 13936312 | Zea mays | 164 | 55.6 | 8.39E−64 |
| Ceres CLONE ID no. | Zea mays | 165 | 50.1 | 4.59E−63 |
| 283597 | | | | |
| Ceres CLONE ID no. | Zea mays | 166 | 50.1 | 4.59E−63 |
| 443626 | | | | |
| Public GI no. 13936314 | Zea mays | 167 | 50.1 | 4.59E−63 |

[0342] TABLE 27
Percent identity to Ceres cDNA ID 23472397 (SEQ ID NO: 169)

| | | SEQ ID | | |
|---|---|---|---|---|
| Designation | Species | NO: | % Identity | e-value |
| Ceres CLONE ID no. | Glycine max | 170 | 72.4 | 4.10E−39 |
| 554743 | | | | |
| Ceres CLONE ID no. | Glycine max | 171 | 72.4 | 4.10E−39 |
| 1623097 | | | | |
| Public GI no. 3341468 | Nicotiana | 172 | 64.6 | 4.79E−29 |
| | tabacum | | | |
| Ceres CLONE ID no. | Glycine max | 173 | 59.6 | 1.40E−38 |
| 1120474 | | | | |
| Ceres CLONE ID no. | Triticum | 174 | 58.8 | 3.69E−30 |
| 729860 | aestivum | | | |
| Public GI no. 37051131 | Pisum | 175 | 54.6 | 2.20E−33 |
| | sativum | | | |

[0343] TABLE 28
Percent identity to Ceres cDNA ID 23522373 (SEQ ID NO: 177)

| | | SEQ ID | | |
|---|---|---|---|---|
| Designation | Species | NO: | % Identity | e-value |
| Public GI no. 3608135 | Arabidopsis thaliana | 178 | 81.3 | 3.80E−139 |
| Ceres CLONE ID no. | Arabidopsis thaliana | 179 | 80.3 | 9.39E−152 |
| 1188156 | | | | |
| Public GI no. 3336903 | Petroselinum crispum | 180 | 69.5 | 9.70E−118 |
| Ceres CLONE ID no. | Glycine max | 181 | 68.6 | 3.80E−123 |
| 545441 | | | | |
| Public GI no. 5381313 | Catharanthus roseus | 182 | 68.6 | 5.50E−124 |
| Public GI no. 3336906 | Petroselinum crispum | 183 | 68.5 | 1.20E−119 |
| Public GI no. 13775109 | Phaseolus vulgaris | 184 | 66.8 | 5.80E−120 |
| Public GI no. 435942 | Oryza sativa subsp. | 185 | 65.5 | 1.10E−104 |
| | japonica | | | |
| Ceres CLONE ID no. | Glycine max | 186 | 65.2 | 7.49E−111 |
| 523155 | | | | |
| Public GI no. 13775107 | Phaseolus vulgaris | 187 | 64.3 | 1.49E−112 |
| Ceres CLONE ID no. | Zea mays | 188 | 63.7 | 4.90E−84 |
| 287677 | | | | |

[0344] TABLE 29
Percent identity to Ceres cDNA ID 23655935 (SEQ ID NO: 190)

| | | SEQ ID | | |
|---|---|---|---|---|
| Designation | Species | NO: | % Identity | e-value |
| Public GI no. | Oryza sativa subsp. | 191 | 56.9 | 0 |
| 50928937 | japonica | | | |

[0345] TABLE 30
Percent identity to Ceres cDNA ID 24365511 (SEQ ID NO: 193)

| | | SEQ ID | | |
|---|---|---|---|---|
| Designation | Species | NO: | % Identity | e-value |
| Public GI no. | Oryza sativa subsp. | 194 | 62.5 | 0 |
| 52076911 | japonica | | | |

[0346] TABLE 31
Percent identity to Ceres cDNA ID 23377122 (SEQ ID NO: 200)

| | | SEQ ID | | |
|---|---|---|---|---|
| Designation | Species | NO: | % Identity | e-value |
| Ceres CLONE ID no. | Glycine max | 201 | 55.4 | 2.09E−67 |
| 467905 | | | | |
| Public GI no. 50907599 | Oryza sativa | 202 | 52.5 | 1.30E−58 |
| | subsp. | | | |
| | japonica | | | |
| Ceres CLONE ID no. | Triticum | 203 | 49.6 | 4.10E−55 |
| 826195 | aestivum | | | |
| Ceres CLONE ID no. | Zea mays | 204 | 37.6 | 4.89E−36 |
| 450772 | | | | |

[0347] TABLE 32
Percent identity to Ceres cDNA ID 23388445 (SEQ ID NO: 206)

| | | SEQ ID | | |
|---|---|---|---|---|
| Designation | Species | NO: | % Identity | e-value |
| Public GI no. 21618279 | Arabidopsis thaliana | 207 | 91.47 | 0 |
| Ceres CLONE ID no. | Arabidopsis thaliana | 208 | 91.47 | 0 |
| 3542 | | | | |
| Ceres CLONE ID no. | Arabidopsis thaliana | 209 | 91.18 | 0 |
| 29363 | | | | |
| Public GI no. 23198042 | Arabidopsis thaliana | 210 | 90.88 | 0 |
| Ceres CLONE ID no. | Glycine max | 211 | 50.59 | 2.19E−85 |
| 1104497 | | | | |
| Ceres CLONE ID no. | Glycine max | 212 | 69.42 | 1.49E−125 |
| 538877 | | | | |
| Public GI no. 50907243 | Oryza sativa subsp. | 213 | 68.14 | 8.29E−111 |
| | japonica | | | |
| Ceres CLONE ID no. | Zea mays | 214 | 62.65 | 1.90E−104 |
| 260992 | | | | |
| Ceres CLONE ID no. | Triticum aestivum | 215 | 66.04 | 3.30E−107 |
| 634320 | | | | |

[0348] TABLE 33
Percent identity to Ceres cDNA ID 23704869 (SEQ ID NO: 221)

| | | SEQ ID | | |
|---|---|---|---|---|
| Designation | Species | NO: | % Identity | e-value |
| Public GI no. 16797791 | Nicotiana tabacum | 222 | 62.3 | 4.20E−101 |
| Public GI no. 1806261 | Petroselinum crispum | 223 | 59.8 | 7.20E−90 |
| Ceres CLONE ID no. | Zea mays | 224 | 54.5 | 2.60E−60 |
| 295738 | | | | |
| Public GI no. 168428 | Zea mays | 225 | 54.5 | 5.50E−60 |
| Public GI no. 1144536 | Zea mays | 226 | 54.3 | 4.79E−61 |
| Public GI no. 7489532 | Oryza sativa | 227 | 53.6 | 7.80E−61 |
| Public GI no. 542187 | Zea mays | 228 | 53.4 | 9.90E−61 |
| Public GI no. 34897226 | Oryza sativa subsp. | 229 | 53.4 | 1.30E−60 |
| | japonica | | | |
| Public GI no. 4115746 | Oryza sativa subsp. indica | 230 | 52.9 | 1.10E−59 |
| Public GI no. 15865782 | Oryza sativa subsp. indica | 231 | 52.6 | 3.50E−58 |
| Ceres CLONE ID no. | Zea mays | 232 | 51.9 | 2.39E−59 |
| 235570 | | | | |
| Public GI no. 1076760 | Sorghum bicolor | 233 | 50.9 | 3.39E−28 |
| Public GI no. 1869928 | Hordeum vulgare subsp. | 234 | 50.7 | 4.89E−52 |
| | vulgare | | | |
| Public GI no. 463212 | Coix lacryma-jobi | 235 | 47.5 | 2.50E−32 |
| Public GI no. 21435101 | Pennisetum glaucum | 236 | 43.5 | 3.00E−32 |

### Other Embodiments

[0349] It is to be understood that while the invention has been described in conjunction with the detailed description thereof, the foregoing description is intended to illustrate and not limit the scope of the invention, which is defined by the scope of the appended claims. Other aspects, advantages, and modifications are within the scope of the following claims.

What is claimed is:

1. A method of determining whether or not a regulatory region is activated by a regulatory protein comprising:
determining whether or not reporter activity is detected in a plant cell transformed with:
a) a recombinant nucleic acid construct comprising a regulatory region operably linked to a nucleic acid encoding a polypeptide having said reporter activity; and
b) a recombinant nucleic acid construct comprising a nucleic acid encoding a regulatory protein comprising a polypeptide sequence having 80% or greater sequence identity to a polypeptide sequence selected from the group consisting of SEQ ID NOs:2-5, SEQ ID NOs:7-16, SEQ ID NOs:18-33, SEQ ID NOs:35-42, SEQ ID NOs:44-61, SEQ ID NOs:63-70, SEQ ID NOs:72-79, SEQ ID NOs:81-86, SEQ ID NOs:88-99, SEQ ID NOs:101-113, SEQ ID NOs:115-122, SEQ ID NOs:124-136, SEQ ID NOs:138-150, SEQ ID NOs:152-156, SEQ ID NOs:158-167, SEQ ID NOs:169-175, SEQ ID NOs:177-188, SEQ ID NOs:190-191, SEQ ID NOs:193-194, SEQ ID NO:196, SEQ ID NO:198, SEQ ID NOs:200-204, SEQ ID NOs:206-215, SEQ ID NO:217, SEQ ID NO:219, SEQ ID NOs:221-236, and the consensus sequences set forth in FIGS. 1-22;
wherein detection of said reporter activity indicates that said regulatory region is activated by said regulatory protein.

2. The method of claim 1, wherein said plant cell is stably transformed with said recombinant nucleic acid construct comprising a regulatory region operably linked to a nucleic acid encoding a polypeptide having a reporter activity and transiently transformed with said recombinant nucleic acid construct comprising said nucleic acid encoding said regulatory protein.

3. The method of claim 1, wherein said plant cell is stably transformed with said recombinant nucleic acid construct comprising said nucleic acid encoding said regulatory protein and transiently transformed with said recombinant nucleic acid construct comprising said regulatory region operably linked to a nucleic acid encoding a polypeptide having a reporter activity.

4. The method of claim 1, wherein said plant cell is stably transformed with said recombinant nucleic acid construct comprising said nucleic acid encoding said regulatory protein and stably transformed with said recombinant nucleic acid construct comprising said regulatory region operably linked to a nucleic acid encoding a polypeptide having a reporter activity.

5. The method of claim 1, wherein said plant cell is transiently transformed with said recombinant nucleic acid construct comprising said nucleic acid encoding said regulatory protein and transiently transformed with said recombinant nucleic acid construct comprising said regulatory region operably linked to a nucleic acid encoding a polypeptide having a reporter activity.

6. A method of determining whether or not a regulatory region is activated by a regulatory protein comprising:
determining whether or not reporter activity is detected in a plant cell transformed with:
a) a recombinant nucleic acid construct comprising a regulatory region comprising a nucleic acid having 80% or greater sequence identity to a regulatory region selected from the group consisting of SEQ ID NOs:237-252 operably linked to a nucleic acid encoding a polypeptide having said reporter activity; and
a) a recombinant nucleic acid construct comprising a nucleic acid encoding a regulatory protein;
wherein detection of said reporter activity indicates that said regulatory region is activated by said regulatory protein.

7. The method of claim 6, wherein said regulatory protein comprises a polypeptide sequence having 80% or greater sequence identity to a polypeptide sequence selected from the group consisting of SEQ ID NOs:2-5, SEQ ID NOs:7-16, SEQ ID NOs:18-33, SEQ ID NOs:35-42, SEQ ID NOs:44-61, SEQ ID NOs:63-70, SEQ ID NOs:72-79, SEQ ID NOs:81-86, SEQ ID NOs:88-99, SEQ ID NOs:101-113, SEQ ID NOs:115-122, SEQ ID NOs:124-136, SEQ ID NOs:138-150, SEQ ID NOs:152-156, SEQ ID NOs:158-167, SEQ ID NOs:169-175, SEQ ID NOs:177-188, SEQ ID NOs:190-191, SEQ ID NOs:193-194, SEQ ID NO:196, SEQ ID NO:198, SEQ ID NOs:200-204, SEQ ID NOs:206-215, SEQ ID NO:217, SEQ ID NO:219, SEQ ID NOs:221-236, and the consensus sequences set forth in FIGS. 1-22.

8. A plant cell comprising an exogenous nucleic acid, said exogenous nucleic acid comprising a nucleic acid encoding a regulatory protein comprising a polypeptide sequence having 80% or greater sequence identity to a polypeptide sequence selected from the group consisting of SEQ ID NOs:2-5, SEQ ID NOs:7-16, SEQ ID NOs:18-33, SEQ ID NOs:35-42, SEQ ID NOs:44-61, SEQ ID NOs:63-70, SEQ ID NOs:72-79, SEQ ID NOs:81-86, SEQ ID NOs:88-99, SEQ ID NOs:101-113, SEQ ID NOs:115-122, SEQ ID NOs:124-136, SEQ ID NOs:138-150, SEQ ID NOs:152-156, SEQ ID NOs:158-167, SEQ ID NOs:169-175, SEQ ID NOs:177-188, SEQ ID NOs:190-191, SEQ ID NOs:193-194, SEQ ID NO:196, SEQ ID NO:198, SEQ ID NOs:200-204, SEQ ID NOs:206-215, SEQ ID NO:217, SEQ ID NO:219, SEQ ID NOs:221-236, and the consensus sequences set forth in FIGS. 1-22, wherein said nucleic acid is operably linked to a regulatory region that modulates transcription of said regulatory protein in said plant cell.

9. The plant cell of claim 8, wherein said regulatory region is a tissue-preferential promoter.

10. The plant cell of claim 9, wherein said tissue-preferential promoter is a vascular tissue-preferential promoter or a poppy capsule-preferential promoter.

11. The plant cell of claim 8, wherein said plant cell further comprises an endogenous regulatory region that is associated with said regulatory protein.

12. The plant cell of claim 8, wherein said regulatory protein modulates transcription of an endogenous gene involved in alkaloid biosynthesis in said cell.

13. The plant cell of claim 8, wherein said plant cell further comprises an exogenous regulatory region operably linked to a sequence of interest, wherein said exogenous regulatory region is associated with said regulatory protein, and wherein said exogenous regulatory region comprises a nucleic acid having 80% or greater sequence identity to a regulatory region selected from the group consisting of SEQ ID NOs:237-252.

14. The plant cell of claim 8, 11, or 13, wherein said plant cell is capable of producing one or more alkaloids.

15. The plant cell of claim 14, wherein at least one of said one or more alkaloids is salutaridine, salutaridinol, salutaridinol acetate, thebaine, isothebaine, papaverine, narcotine, noscapine, narceine, hydrastine, oripavine, morphinone, morphine, codeine, codeinone, and neopinone.

16. The plant cell of claim 14, wherein said plant is a member of the Papaveraceae, Menispermaceae, Lauraceae, Euphorbiaceae, Berberidaceae, Leguminosae, Boraginaceae, Apocynaceae, Asclepiadaceae, Liliaceae, Gnetaceae, Erythroxylaceae, Convolvulaceae, Ranunculaeceae, Rubiaceae, Solanaceae, or Rutaceae families.

17. The plant cell of claim 14, wherein said plant is a member of the species Papaver bracteatum, Papaver orientale, Papaver setigerum, Papaver somniferum, Croton salutaris, Croton balsamifera, Sinomenium acutum, Stephania cepharantha, Stephania zippeliana, Litsea sebiferea, Alseodaphne perakensis, Cocculus laurifolius, Duguetia obovata, Rhizocarya racemifera, or Beilschmiedia oreophila.

18. The plant cell of claim 14, wherein said cell further comprises a nucleic acid encoding a second regulatory protein operably linked to a second regulatory region that modulates transcription of said second regulatory protein in said plant cell.

19. The plant cell of claim 13, wherein said sequence of interest comprises a coding sequence for a polypeptide involved in alkaloid biosynthesis.

20. The plant cell of claim 11 or 13, wherein said regulatory protein-regulatory region association is effective for modulating the amount of at least one alkaloid compound in said cell.

21. A Papaveraceae plant comprising an exogenous nucleic acid, said exogenous nucleic acid comprising a nucleic acid encoding a regulatory protein comprising a polypeptide sequence having 80% or greater sequence identity to a polypeptide sequence selected from the group consisting of SEQ ID NOs:2-5, SEQ ID NOs:7-16, SEQ ID NOs:18-33, SEQ ID NOs:35-42, SEQ ID NOs:44-61, SEQ ID NOs:63-70, SEQ ID NOs:72-79, SEQ ID NOs:81-86, SEQ ID NOs:88-99, SEQ ID NOs:101-113, SEQ ID NOs:115-122, SEQ ID NOs:124-136, SEQ ID NOs:138-150, SEQ ID NOs:152-156, SEQ ID NOs:158-167, SEQ ID NOs:169-175, SEQ ID NOs:177-188, SEQ ID NOs:190-191, SEQ ID NOs:193-194, SEQ ID NO:196, SEQ ID NO:198, SEQ ID NOs:200-204, SEQ ID NOs:206-215, SEQ ID NO:217, SEQ ID NO:219, SEQ ID NOs:221-236, and the consensus sequences set forth in FIGS. 1-22, wherein said nucleic acid is operably linked to a regulatory region that modulates transcription of said regulatory protein in said plant cell.

22. A method of expressing a sequence of interest comprising:
growing a plant cell comprising:
a) an exogenous nucleic acid comprising a regulatory region comprising a nucleic acid having 80% or greater sequence identity to a regulatory region selected from the group consisting of SEQ ID NOs:237-252, wherein said regulatory region is operably linked to a sequence of interest; and
b) an exogenous nucleic acid comprising a nucleic acid encoding a regulatory protein comprising a polypeptide sequence having 80% or greater sequence identity to a polypeptide sequence selected from the group consisting of SEQ ID NOs:2-5, SEQ ID NOs:7-16, SEQ ID NOs:18-33, SEQ ID NOs:35-42, SEQ ID NOs:44-61, SEQ ID NOs:63-70, SEQ ID NOs:72-79, SEQ ID NOs:81-86, SEQ ID NOs:88-99, SEQ ID NOs:101-113, SEQ ID NOs:115-122, SEQ ID NOs:124-136, SEQ ID NOs:138-150, SEQ ID NOs:152-156, SEQ ID NOs:158-167, SEQ ID NOs:169-175, SEQ ID NOs:177-188, SEQ ID NOs:190-191, SEQ ID NOs:193-194, SEQ ID NO:196, SEQ ID NO:198, SEQ ID NOs:200-204, SEQ ID NOs:206-215, SEQ ID NO:217, SEQ ID NO:219, SEQ ID NOs:221-236, and the consensus sequences set forth in FIGS. 1-22;
wherein said regulatory region and said regulatory protein are associated, and wherein said plant cell is grown under conditions effective for the expression of said regulatory protein.

23. A method of expressing an endogenous sequence of interest comprising growing a plant cell comprising an endogenous regulatory region operably linked to a sequence of interest, wherein said endogenous regulatory region comprises a nucleic acid having 80% or greater sequence identity to a regulatory region selected from the group consisting of SEQ ID NOs:237-252, wherein said plant cell further comprises a nucleic acid encoding an exogenous regulatory protein, said exogenous regulatory protein comprising a polypeptide sequence having 80% or greater sequence identity to a polypeptide sequence selected from the group consisting of SEQ ID NOs:2-5, SEQ ID NOs:7-16, SEQ ID NOs:18-33, SEQ ID NOs:35-42, SEQ ID NOs:44-61, SEQ ID NOs:63-70, SEQ ID NOs:72-79, SEQ ID NOs:81-86, SEQ ID NOs:88-99, SEQ ID NOs:101-113, SEQ ID NOs:115-122, SEQ ID NOs:124-136, SEQ ID NOs:138-150, SEQ ID NOs:152-156, SEQ ID NOs:158-167, SEQ ID NOs:169-175, SEQ ID NOs:177-188, SEQ ID NOs:190-191, SEQ ID NOs:193-194, SEQ ID NO:196, SEQ ID NO:198, SEQ ID NOs:200-204, SEQ ID NOs:206-215, SEQ ID NO:217, SEQ ID NO:219, SEQ ID NOs:221-236, and the consensus sequences set forth in FIGS. 1-22, wherein said exogenous regulatory protein and said endogenous regulatory region are associated, wherein said plant cell is grown under conditions effective for the expression of said exogenous regulatory protein.

24. A method of expressing an exogenous sequence of interest comprising growing a plant cell comprising an exogenous regulatory region operably linked to a sequence of interest, wherein said exogenous regulatory region comprises a nucleic acid having 80% or greater sequence identity to a regulatory region selected from the group consisting of SEQ ID NOs:237-252, wherein said plant cell further comprises a nucleic acid encoding an endogenous regulatory protein, said endogenous regulatory protein comprising a polypeptide sequence having 80% or greater sequence identity to a polypeptide sequence selected from the group consisting of SEQ ID NOs:2-5, SEQ ID NOs:7-16, SEQ ID NOs:18-33, SEQ ID NOs:35-42, SEQ ID NOs:44-61, SEQ ID NOs:63-70, SEQ ID NOs:72-79, SEQ ID NOs:81-86, SEQ ID NOs:88-99, SEQ ID NOs:101-113, SEQ ID NOs:115-122, SEQ ID NOs:124-136, SEQ ID NOs:138-150, SEQ ID NOs:152-156, SEQ ID NOs:158-167, SEQ ID NOs:169-175, SEQ ID NOs:177-188, SEQ ID NOs:190-191, SEQ ID NOs:193-194, SEQ ID NO:196, SEQ ID NO:198, SEQ ID NOs:200-204, SEQ ID NOs:206-215, SEQ ID NO:217, SEQ ID NO:219, SEQ ID NOs:221-236, and the consensus sequences set forth in FIGS. 1-22, wherein said regulatory region and said regulatory protein are associated, and wherein said plant cell is grown under conditions effective for the expression of said endogenous regulatory protein.

25. A method of modulating the expression level of one or more endogenous Papaveraceae genes involved in alkaloid biosynthesis, said method comprising transforming a cell of a member of the Papaveraceae family with a recombinant nucleic acid construct, wherein said nucleic acid construct comprises a nucleic acid encoding a regulatory protein comprising a polypeptide sequence selected from the group consisting of SEQ ID NOs:2-5, SEQ ID NOs:7-16, SEQ ID NOs:18-33, SEQ ID NOs:35-42, SEQ ID NOs:44-61, SEQ ID NOs:63-70, SEQ ID NOs:72-79, SEQ ID NOs:81-86, SEQ ID NOs:88-99, SEQ ID NOs:101-113, SEQ ID NOs:115-122, SEQ ID NOs:124-136, SEQ ID NOs:138-150, SEQ ID NOs:152-156, SEQ ID NOs:158-167, SEQ ID NOs:169-175, SEQ ID NOs:177-188, SEQ ID NOs:190-191, SEQ ID NOs:193-194, SEQ ID NO:196, SEQ ID NO:198, SEQ ID NOs:200-204, SEQ ID NOs:206-215, SEQ ID NO:217, SEQ ID NO:219, SEQ ID NOs:221-236, and the consensus sequences set forth in FIGS. 1-22, and wherein said nucleic acid is operably linked to a regulatory region that modulates transcription in the family member.

26. A method of producing one or more alkaloids in a plant cell comprising growing the plant cell of claim 11 under conditions effective for the expression of said regulatory protein, wherein said plant cell is capable of producing one or more alkaloids, and wherein said endogenous regulatory region is operably linked to a sequence of interest comprising a coding sequence for a polypeptide involved in alkaloid biosynthesis.

27. A method of producing one or more alkaloids in a plant cell comprising growing the plant cell of claim 13 under conditions effective for the expression of said regulatory protein, wherein said sequence of interest comprises a coding sequence for a polypeptide involved in alkaloid biosynthesis.

28. A method of modulating an amount of one or more alkaloid compounds in a Papaveraceae family member, said method comprising transforming a member of the Papaveraceae family with a recombinant nucleic acid construct, wherein said nucleic acid construct comprises a nucleic acid encoding a regulatory protein comprising a polypeptide sequence selected from the group consisting of SEQ ID NOs:2-5, SEQ ID NOs:7-16, SEQ ID NOs:18-33, SEQ ID NOs:35-42, SEQ ID NOs:44-61, SEQ ID NOs:63-70, SEQ ID NOs:72-79, SEQ ID NOs:81-86, SEQ ID NOs:88-99, SEQ ID NOs:101-113, SEQ ID NOs:115-122, SEQ ID NOs:124-136, SEQ ID NOs:138-150, SEQ ID NOs:152-156, SEQ ID NOs:158-167, SEQ ID NOs:169-175, SEQ ID NOs:177-188, SEQ ID NOs:190-191, SEQ ID NOs:193-194, SEQ ID NO:196, SEQ ID NO:198, SEQ ID NOs:200-204, SEQ ID NOs:206-215, SEQ ID NO:217, SEQ ID NO:219, SEQ ID NOs:221-236, and the consensus sequences set forth in FIGS. 1-22, and wherein said nucleic acid is operably linked to a regulatory region that modulates transcription in said family member.

29. The method of claim 28, wherein said one or more alkaloid compounds are selected from the group consisting of salutaridine, salutaridinol, salutaridinol acetate, thebaine, isothebaine, papaverine, narcotine, noscapine, narceine, hydrastine, oripavine, morphinone, morphine, codeine, codeinone, and neopinone.

The application's sequence listing, which the Patent Office published only in electronic form, follows.

SEQUENCE LISTING (371 sequences)

SEQ ID NO: 1 - DNA, 720 bp, Arabidopsis thaliana
  misc_feature (1)..(720): Ceres CDNA ID no. 23356923
  misc_feature (1)..(720): Also Known As Ceres GEMINI ID 531E4
  misc_feature (1)..(720): Also Known As Ceres CLONE ID 19578
attctgaaagaataaaaacatattctttctctcaaatgctttccttttaatggagacgaagacgaaaccctaatttccccaaattcactatgaagcgtattatcagaatctcattcaccgacgcagaagccaccgattcttctagcgacgaagacacggaggagcgtggaggagcatcccagactcgccgccgtgggaaacgcctcgttaaagagatcgtaatcgatccttccgattccgccgataaactctatgtctgcaaaacacggttcaaaatcaggatcccggcggaatttctcaagacggcgaaaacggagaagaaatatcgtggagtgaggcagaggccgtgggggaagtgggtggcggagatcagatgtggaagaggatcttgtaaaggacgacgtgatcgtctctggctgggtacttttaacactgctgaggaagctgctcttgcttatgataacgcttcaattaagctgattggacctcacgcgccgaccaattttggtttgccggcggagaatcaagaggataagacggtgattggagcttctgaggttgctagaggcgcgtgaagtggggttggtaatttagttgttagcattagcaagaaggtctctctcgtattttgtaaattcctcttctgatgttgtgtatgatcttgatgtctttcgtctatgtatgtatatgaaactcgagaaatgaactatattttgattt

SEQ ID NO: 2 - protein, 161 aa, Arabidopsis thaliana
  misc_feature (1)..(161): Ceres CDNA ID no. 23356923
  misc_feature (1)..(161): Also Known As Ceres GEMINI ID 531E4
  misc_feature (1)..(161): Also Known As Ceres CLONE ID 19578
  misc_feature (77)..(145): Pfam Name: AP2; Pfam Description: AP2 domain
MKRIIRISFTDAEATDSSSDEDTEERGGASQTRRRGKRLVKEIVIDPSDSADKLYVCKTRFKIRIPAEFLKTAKTEKKYRGVRQRPWGKWVAEIRCGRGSCKGRRDRLWLGTFNTAEEAALAYDNASIKLIGPHAPTNFGLPAENQEDKTVIGASEVARGA

SEQ ID NO: 3 - protein, 161 aa, Arabidopsis thaliana
  misc_feature (1)..(161): Public GI no. 51970702
  misc_feature (1)..(161): Functional Homolog of  Ceres CDNA ID no. 23356923 at SEQ ID NO. 2 with e-value of 4.50E-81 and percent identity of 98.7
MKRIIRISFTDAEATDSSSDEDTEERGGASQTRRRGKRLVKEIVIDPSDSADKLDVCKTRFKIRIPAEFLKTAKTEKKYRGVRQRPWGKWVAEIRCGRGACKGRRDRLWLGTFNTAEEAALAYDNASIKLIGPHAPTNFGLPAENQEDKTVIGASEVARGA

SEQ ID NO: 4 - protein, 146 aa, Brassica napus
  misc_feature (1)..(146): Ceres CLONE ID no. 871060
  misc_feature (1)..(146): Functional Homolog of  Ceres CDNA ID no. 23356923 at SEQ ID NO. 2 with e-value of 1.59E-51 and percent identity of 81.8
  misc_feature (40)..(40): Xaa is any aa, unknown, or other
MKRIVRISVTDAEATDSSSDEDTEEPCRETTTTAQVRRRXGKRLVKEIVIDPPDSDDNRDACKTRFKIRIPAEFLKATAEGGKKKFRGVRQRPWGKWAAEIRCGRALKGRRDRLWLGTFDTAEEAALAYDNAAVQLIGPHAPTNFS

SEQ ID NO: 5 - protein, 138 aa, Brassica napus
  misc_feature (1)..(138): Ceres CLONE ID no. 1069147
  misc_feature (1)..(138): Functional Homolog of  Ceres CDNA ID no. 23356923 at SEQ ID NO. 2 with e-value of 4.49E-49 and percent identity of 78.9
MKRIVRISFTDAEATDSSSSEEEADQLSEPSLARRRGKRLVKEIVIDSSDSDNKLDVCKTRFKIRIPPEFLKAATAEKKNKKKFRGVRQRPWGKWAAEIRCGRALKGRRDRLWLGTFDTAEEAALAYDNAAVQLIGPH

SEQ ID NO: 6 - DNA, 711 bp, Arabidopsis thaliana
  misc_feature (1)..(711): Ceres CDNA ID no. 23357249
  misc_feature (1)..(711): Also Known As Ceres GEMINI ID 531E7
  misc_feature (1)..(711): Also Known As Ceres CLONE ID 18903
acatcctctcactgcctcttttctcactcactgttacttcgctaaaaccctaatttcgccattcccttctctaagttttgtgtgtagacatttagaaatggctttctgcaacaaacttagcggtatcttgagacaaggggtttctcatagctcaaatggtccagttacatctatgcttggctctcttcgttacatgtcctctaagctttttgttggtggtctctcttggggaactgatgacagctccttaaagcaagctttcactagctttggtgaagtcacagaagcaacggtgattgcagacagagagacagggaggtcgaggggattcggatttgttagcttcagctgtgaggattctgctaacaatgccataaaagaaatggatggaaaggagctgaatggtaggcaaatccgtgtgaatcttgcaaccgaaagatcgagtgccccgagatcatcatttggtggtggtggcggttacggtggtggcggtggtggtggctactaaagcaaacaagccagaggatttgagagatagaggagcctcagaactttcagtagttagttagtttgtttgtttcctctttgtttaactgcaaataaccttaactggttttgttaaacttatttagccctgttttttggttgtgtctgaataccgtagtattgttgctccatcttctgcaaatctattagcatcgagttcgatcc

SEQ ID NO: 7 - protein, 136 aa, Arabidopsis thaliana
  misc_feature (1)..(136): Ceres CDNA ID no. 23357249
  misc_feature (1)..(136): Also Known As Ceres GEMINI ID 531E7
  misc_feature (1)..(136): Also Known As Ceres CLONE ID 18903
  misc_feature (37)..(108): Pfam Name: RRM_1; Pfam Description: RNA recognition motif. (a.k.a. RRM, RBD, or RNP domain)
MAFCNKLSGILRQGVSHSSNGPVTSMLGSLRYMSSKLFVGGLSWGTDDSSLKQAFTSFGEVTEATVIADRETGRSRGFGFVSFSCEDSANNAIKEMDGKELNGRQIRVNLATERSSAPRSSFGGGGGYGGGGGGGY

SEQ ID NO: 8 - protein, 153 aa, Zea mays
  misc_feature (1)..(153): Ceres CLONE ID no. 1388283
  misc_feature (1)..(153): Functional Homolog of  Ceres CDNA ID no. 23357249 at SEQ ID NO. 52 with e-value of 5.19E-48 and percent identity of 75.3
MAFCKSLGGLLRQGVVSQTGNIPVTSVLGSLRYMSTKLFVGGLSWGTDDQSLREAFANFGEVVDAKVIVDRETGRSRGFGFVNFTDETAANTAISEMDGKDLNGRSIRVNVANERPSTPRYGGGGGYGGGGGYGGGGYGGGSYGAGGGDGGGY

SEQ ID NO: 9 - protein, 146 aa, Pisum sativum
  misc_feature (1)..(146): Public GI no. 1778374
  misc_feature (1)..(146): Functional Homolog of  Ceres CDNA ID no. 23357249 at SEQ ID NO. 52 with e-value of 2.70E-42 and percent identity of 66.9
MAFCNKLGNLLRQGATQSSHAPVSSMLNYLRHMSSSKLFIGGLSYGVDDQSLKDAFASYGEVVEARVITDRDTGRSRGFGFVNFTSDESATSALSAMDGQDLNGRNIRVSYANDRPSAPRGGGGGYGGGYGDGFSNRGGGGGGGGW

SEQ ID NO: 10 - protein, 144 aa, Nicotiana sylvestris
  misc_feature (1)..(144): Public GI no. 7439995
  misc_feature (1)..(144): Functional Homolog of  Ceres CDNA ID no. 23357249 at SEQ ID NO. 52 with e-value of 5.19E-39 and percent identity of 66.6
MAFYNKLGGLLRQSISGNAVSATSPMPSMLDAVRCMSTKLFVGGLSWGTDDQSLRDAFATFGDVVDARVIVDRDSGRSRGFGFVNFSDDECANEAIKAMDGQELQGRNIRVSIAQERAPRSGGFGGSGGGFGGGYGQARDNDGY

SEQ ID NO: 11 - protein, 144 aa, Nicotiana sylvestris
  misc_feature (1)..(144): Public GI no. 7489099
  misc_feature (1)..(144): Functional Homolog of  Ceres CDNA ID no. 23357249 at SEQ ID NO. 52 with e-value of 7.10E-35 and percent identity of 65.8
MAFYNKLGGLLRQSISGNAVSATSPMKSMLDAVRCMSTKLFVGGLSWGTDDQSLRDAFATFGDVVDARVIVDRDSGRSRGFGFVNFSDDECANEAIKAMDGQELQGRNIRVRIAQERAPRSGGFGGSVVDLVAAMVKLETMMDT

SEQ ID NO: 12 - protein, 150 aa, Oryza sativa subsp. japonica
  misc_feature (1)..(150): Public GI no. 34906972
  misc_feature (1)..(150): Functional Homolog of  Ceres CDNA ID no. 23357249 at SEQ ID NO. 52 with e-value of 1.59E-35 and percent identity of 64.6
MAAFNKLGSFLRHSGLTSSASAGSSPAMFNAARLMSTKLFVGGLSWNTNDDSLKEAFTSFGDVTEARVINDRESGRSRGFGFVSFANGDDAKSAMDAMDGKELEGRSIRVNFANERPPGNRGGGGYGGGGGGYGNQGGYGDGNRGYGGQY

SEQ ID NO: 13 - protein, 143 aa, Glycine max
  misc_feature (1)..(143): Ceres CLONE ID no. 536457
  misc_feature (1)..(143): Functional Homolog of  Ceres CDNA ID no. 23357249 at SEQ ID NO. 52 with e-value of 1.80E-38 and percent identity of 61.6
MAFCNKVGNVLRQGAARSTHAPVASMLNYIRCMSSSKLFIGGLSYGVDDQSLKDAFSGFGDVVDAKVITDRDSGRSRGFGFVNFSNDESASSALSAMDGKDLNGRSIRVSYANDKPSAPRPGGGGGYRGGDYDGDFASRSGGW

SEQ ID NO: 14 - protein, 138 aa, Glycine max
  misc_feature (1)..(138): Ceres CLONE ID no. 744170
  misc_feature (1)..(138): Functional Homolog of  Ceres CDNA ID no. 23357249 at SEQ ID NO. 52 with e-value of 7.49E-40 and percent identity of 61.0
MAFCNKVGNVLRQGAARSTQAPVSSMLNYIRCMSSSKLFIGGLSYGVDDQSLKDAFSGFGDVVDAKVITDRDSGRSRGFGFVNFSNDESASSALSAMDGKDLDGRSIRVSYANDRPSGPQSGGGGGGGYRSGGFGGGW

SEQ ID NO: 15 - protein, 176 aa, Triticum aestivum
  misc_feature (1)..(176): Ceres CLONE ID no. 579861
  misc_feature (1)..(176): Functional Homolog of  Ceres CDNA ID no. 23357249 at SEQ ID NO. 52 with e-value of 1.70E-39 and percent identity of 60.4
MAALIKLGSLLRQSAVASSASTGSAPALFNAARFMCAGQPADGSKLFVGGLAWATDDHSLKEAFQCFGEVVEARVITDRETGRSRGFGFVSFASGEDAKSAAENMDGKELAGRNVRVNFANERPSGGGGGGGFSRGGGGYGGGGGGYGGGGFGGGGGYGGGRGGGGGGYGGDRESY

SEQ ID NO: 16 - protein, 155 aa, Physcomitrella patens
  misc_feature (1)..(155): Public GI no. 21388662
  misc_feature (1)..(155): Functional Homolog of  Ceres CDNA ID no. 23357249 at SEQ ID NO. 52 with e-value of 1.79E-29 and percent identity of 54.4
MAFLAQLGGLVRQSIARNALQRHSSAAAIPAMFLVSRGMSGSKLFVGGLAWGTTDDNIKEAFSAFGEVTEVKIICDRDTGRSRGFGFVTFATDQDAEAALQALDGRDLAGRTIRVNYATKQSPQDRQSGGGMYGRRDHSGGNSGNFGGSGTWRGM

SEQ ID NO: 17 - DNA, 640 bp, Arabidopsis thaliana
  misc_feature (1)..(640): Ceres CDNA ID no. 23358452
  misc_feature (1)..(640): Also Known As Ceres GEMINI ID 531H7
  misc_feature (1)..(640): Also Known As Ceres CLONE ID 16204
aatcgtcgtctctccccaattcaaaaaaagaaataacctaaacgtgttcacacagagatctcgagatgaaagataaccaaacggaagttgaatcgaggagcactgatgatagattgaaagttagagggaacaaagttggaaagaaaacaaaggatccaaacaggcctaagaaaccaccaagtcctttcttcgtcttcctggacgatttccgaaaggagtttaatctggctaaccctgacaacaaatccgtcggtaatgttggtagagcagctggaaagaaatggaaaaccatgactgaggaagaaagagcaccttttgtagcaaaatcacagagcaaaaagactgagtatgctgtgactatgcaacagtataacatggaactggctaatggaaacaagacaactggagatgatgagaaacaagagaaagctgctgatgattaggaagttggatcagtgatttgtgtatcaactatatctgttgttttatgtcaacttttagctagcttttagggagaacaattgttacattcctgttttatcctttctgtcaactgtgggattattcagatgtaactttggatttagctttgagcttcaattccaccttttatgagatcatatcatatgtttgcaatctt

SEQ ID NO: 18 - protein, 125 aa, Arabidopsis thaliana
  misc_feature (1)..(125): Ceres CDNA ID no. 23358452
  misc_feature (1)..(125): Also Known As Ceres GEMINI ID 531H7
  misc_feature (1)..(125): Also Known As Ceres CLONE ID 16204
  misc_feature (34)..(103): Pfam Name: HMG_box; Pfam Description: HMG (high mobility group) box
MKDNQTEVESRSTDDRLKVRGNKVGKKTKDPNRPKKPPSPFFVFLDDFRKEFNLANPDNKSVGNVGRAAGKKWKTMTEEERAPFVAKSQSKKTEYAVTMQQYNMELANGNKTTGDDEKQEKAADD

SEQ ID NO: 19 - protein, 141 aa, Brassica napus
  misc_feature (1)..(141): Ceres CLONE ID no. 873113
  misc_feature (1)..(141): Functional Homolog of  Ceres CDNA ID no. 23358452 at SEQ ID NO. 18 with e-value of 5.70E-42 and percent identity of 65.3
MKGGETKAQSKSTDERLKTRGKKAGKKAAKDPNKPKRPPSAFFVFLEGFRKEFNLANPDNKSVGAVGKAAGAKWKSMTDEDKAPYVAKAETKKTEYTKTMQKYNMKLANGTSTAGDDDSDKSKSEVNDEAEGASEEEEDDD

SEQ ID NO: 20 - protein, 140 aa, Brassica napus
  misc_feature (1)..(140): Ceres CLONE ID no. 956177
  misc_feature (1)..(140): Functional Homolog of  Ceres CDNA ID no. 23358452 at SEQ ID NO. 18 with e-value of 2.70E-42 and percent identity of 64.5
MKGGESKAQAKSTDERLKTRGKKAGKKVKDPNKPKRPPSAFFVFLEGFRKEFNLANPDNKSVGAVGKAAGAKWKSMTAEDKAPYVAKAETKKTEYAKTMQKYNMKLANGTSTAGDDDSDKSKSEVNDEEDAASDEEEDDD

SEQ ID NO: 21 - protein, 152 aa, Glycine max
  misc_feature (1)..(152): Ceres CLONE ID no. 721511
  misc_feature (1)..(152): Functional Homolog of  Ceres CDNA ID no. 23358452 at SEQ ID NO. 18 with e-value of 8.99E-28 and percent identity of 52.4
MKGGKSKTESKRADAKLAVNKKGAATKTRKPAGKGKAAKDPNKPKRPPSAFFVFMEEFRKVFNKEHPDNKAVSAVGKAAGAKWKTMSDAEKAPYVAKSEKRKVEYEKNMRAYNKKQAEGPTGGDEEESEKSVSEVNDEDDDEEGSGEEEDDD

SEQ ID NO: 22 - protein, 152 aa, Glycine max; identical to SEQ ID NO: 21
  misc_feature (1)..(152): Ceres CLONE ID no. 641329
  misc_feature (1)..(152): Functional Homolog of  Ceres CDNA ID no. 23358452 at SEQ ID NO. 18 with e-value of 8.99E-28 and percent identity of 52.4

SEQ ID NO: 23 - protein, 152 aa, Glycine max
  misc_feature (1)..(152): Ceres CLONE ID no. 782784
  misc_feature (1)..(152): Functional Homolog of  Ceres CDNA ID no. 23358452 at SEQ ID NO. 18 with e-value of 1.90E-27 and percent identity of 51.6
MKGGKSKTESKRADPKLAVNKKGAATKARKPAGKGKAAKDPNKPKRPPSAFFVFMEEFRKVFNKEHPENKAVSAVGKAAGAKWKTMSDAEKAPYVAKSEKRKVEYEKNMRAYNKKQAEGPTGGDEEESEKSVSEVNDEDDDEEGSGEEEDDD

SEQ ID NO: 24 - protein, 152 aa, Glycine max; identical to SEQ ID NO: 23
  misc_feature (1)..(152): Public GI no. 18645
  misc_feature (1)..(152): Functional Homolog of  Ceres CDNA ID no. 23358452 at SEQ ID NO. 18 with e-value of 1.90E-27 and percent identity of 51.6

SEQ ID NO: 25 - protein, 146 aa, Ipomoea nil
  misc_feature (1)..(146): Public GI no. 1052956
  misc_feature (1)..(146): Functional Homolog of  Ceres CDNA ID no. 23358452 at SEQ ID NO. 18 with e-value of 1.19E-23 and percent identity of 48.7
MKGGKSKAKSDNKLAVKKRGCETKKSKKSVKDPNKPKRPPSAFFVFMEDFRKTYKEKHPNNKSVAAVGKAGGDKWKQLTDAEKAPFIAKAEKRKQEYEKSMQAYNRKQAGEAADEEESDKSRSEVNDDEEDEDGSAEDDDDDDDDE

SEQ ID NO: 26 - protein, 154 aa, Pisum sativum
  misc_feature (1)..(154): Public GI no. 436424
  misc_feature (1)..(154): Functional Homolog of  Ceres CDNA ID no. 23358452 at SEQ ID NO. 18 with e-value of 1.70E-26 and percent identity of 48.0
MKGGKSKGESKKAETKLAVNKKGAPATKGGKKPAKGKEPKDPNKPKRPPSAFFVFMEDFRKQFKKGNADNKAVSAVGKAAGAKWKSMTEAEKAPYAAKAEKRKAEYEKSMKSYNKKQAEGPAAVEEEEESEKSESEVHDENDDEEESEEEDDDE

SEQ ID NO: 27 - protein, 141 aa, Solanum tuberosum
  misc_feature (1)..(141): Public GI no. 2894109
  misc_feature (1)..(141): Functional Homolog of  Ceres CDNA ID no. 23358452 at SEQ ID NO. 18 with e-value of 1.09E-22 and percent identity of 47.6
MKGAKSKAKADTKLGVRKKATESKKAKNAAKDPNKPKRPPSAFFVFMEEFRKTYKEKHPNNKSVAVVGKAGGDKWKQLSDEEKAPYQAKAEKRKAEYQKNMDAYNKKLAAGDADDEESDKSKSEVHDDDEDDDGSEQEDDD

SEQ ID NO: 28 - protein, 124 aa, Triticum aestivum
  misc_feature (1)..(124): Ceres CLONE ID no. 686294
  misc_feature (1)..(124): Functional Homolog of  Ceres CDNA ID no. 23358452 at SEQ ID NO. 18 with e-value of 4.69E-22 and percent identity of 46.8
MKAKAGSRAGDSRLAVKKSKAEKDPNKPKRPPSAFFVFMDTFRKEYKEKHPDVKQVSVVGKAGGEKWKSLSDAEKAPYTAKAEKLKAEYTKKINAYNNPQAGEASGDSDKSKSEVNDEDSEGDE

SEQ ID NO: 29 - protein, 127 aa, Oryza sativa subsp. japonica
  misc_feature (1)..(127): Public GI no. 50726318
  misc_feature (1)..(127): Functional Homolog of  Ceres CDNA ID no. 23358452 at SEQ ID NO. 18 with e-value of 3.19E-23 and percent identity of 45.6
MKARSRSSNGDSRLSVRKTKAEKDPNKPKRPPSAFFVFMEQFRKDYKEKHPNVKQVSVIGKAGGDKWKSMTDADKAPFVTKAEKLKAEYTKKIDAYNNKQAGGPATSGDSDKSKSEVNDEDEGSGDE

SEQ ID NO: 30 - protein, 149 aa, Vicia faba
  misc_feature (1)..(149): Public GI no. 729737
  misc_feature (1)..(149): Functional Homolog of  Ceres CDNA ID no. 23358452 at SEQ ID NO. 18 with e-value of 3.60E-24 and percent identity of 44.0
MKGGKSKGESKKAETKLAVNKKGAAATKGGKKPAKGKEPKDPNKPKRPPSAFFVFMADFREQYKKDHPNNKSVAAVGKACGEEWKSLSEEEKAPYVDRALKKKEEYEITLQAYNKKLEGKDDEEGSDKSKSEVNDEDEDEEDEEDEDDD

SEQ ID NO: 31 - protein, 144 aa, Ipomoea nil
  misc_feature (1)..(144): Public GI no. 729736
  misc_feature (1)..(144): Functional Homolog of  Ceres CDNA ID no. 23358452 at SEQ ID NO. 18 with e-value of 1.09E-22 and percent identity of 43.5
MKGGKSKAKSDNKLAVKKQAADTKKTKKAVKDPNKPKRPPSAFFVFMEDFRKTYKEKHPNNKSVAVVGKAGGDKWKQLTAAEKAPFISKAEKRKQEYEKNLQAYNKKQAAGAAEEEESDKSRSEVNDDDEDQDGSGEDDSEDDD

SEQ ID NO: 32 - protein, 145 aa, Zea mays
  misc_feature (1)..(145): Ceres CLONE ID no. 1060767
  misc_feature (1)..(145): Functional Homolog of  Ceres CDNA ID no. 23358452 at SEQ ID NO. 18 with e-value of 2.49E-23 and percent identity of 43.0
MKGGKSKTETRSSKLSVAKKPAKAAGRSKAAAKDPNKPKRPASAFFVFMEDFRQTYKKDHPNNKSVAAVGKAGGEKWKSLSDSEKAPFVAKADKRKVEYEKTMKAYNKKLEEGPKEDEEESDKSVSEVNDEDDADDGSDEEEDDD

SEQ ID NO: 33 - protein, 141 aa, Canavalia gladiata
  misc_feature (1)..(141): Public GI no. 7446231
  misc_feature (1)..(141): Functional Homolog of  Ceres CDNA ID no. 23358452 at SEQ ID NO. 18 with e-value of 2.00E-23 and percent identity of 42.8
MPKVKADAKAADNRLKRKGAGAGRKQSKKAAKDPNKPKRPPSAFFVFMSEFREQYKKEHPTNKSVAVVGKAGGDKWKSLSDAEKAPFVARAEKKKEEYDKSILAYNRKLEGKNPSEEEKSDKSKSEVNDEDEDEEEDQDDE

SEQ ID NO: 34 - DNA, 1036 bp, Arabidopsis thaliana
  misc_feature (1)..(1036): Ceres CDNA ID no. 23360114
  misc_feature (1)..(1036): Also Known As Ceres GEMINI ID 532E7
  misc_feature (1)..(1036): Also Known As Ceres CLONE ID 34363
ccgtcttcgttgctttttcgagcggtgcctagtctcaacttccatggctgacatcttaccttcaaattttctcaaaccaaccaaaaagcttcttctccttttctaaaatttcatcaaaccctatagggttttctcaatacaattgattttttttttcttcttcttctctatggatacgaccctttctcccgccgtggaggcggaacaaatcgccgactcaacgatcgacactgtttctcgtttgatcgccggcgttttctccggcgcacttactggaatcttcgctatggctggagcttttactggagctgtaactggtgcggtggcaggaagagctgcacagtatggagttctccgtggggctgcacttggcgctgttgctggagctatcctctctgttgaagtgttggaggcttctcgtgcgtattggtatttagagctgtcaggatcaaggggtccatcatctatggcagattttgtagagcaactgtttcgtgggagactggtagatgaacaacttatgtcaacaatcataaattcacaccattggcagttaaggatttccgatgtaagttatgaagagcgggaggatgtttatggtgaactggaagctagaggcttatcgggtgactctttaaggaaactaccatgctatataatgtcaagtgaaatggtcaggaggcaggtcactcactgcacaatttgtctgcaggacatcaaaacaggggaaatcacacgaagcttaccgaaatgtgatcatacgtttcatctggtatgtgttgataaatggctcatcagacacgggtcatgccccatttgcagacaggcagttaaagattaaaacacgactgttgccgagctgtgtacatagcaaaaacacattatccttatatgttgttgtaacttgtaagtctaaaacccctttcttctgtatttttcctcatttcatttagagcaatctcagcttgagccataggtttcgacttttgaatgtatattgttgtagacatgaataagaatacctacagatgtattg

SEQ ID NO: 35 - protein, 223 aa, Arabidopsis thaliana
  misc_feature (1)..(223): Ceres CDNA ID no. 23360114
  misc_feature (1)..(223): Also Known As Ceres GEMINI ID 532E7
  misc_feature (1)..(223): Also Known As Ceres CLONE ID 34363
  misc_feature (176)..(217): Pfam Name: zf-C3HC4; Pfam Description: Zinc finger, C3HC4 type (RING finger)
MDTTLSPAVEAEQIADSTIDTVSRLIAGVFSGALTGIFAMAGAFTGAVTGAVAGRAAQYGVLRGAALGAVAGAILSVEVLEASRAYWYLELSGSRGPSSMADFVEQLFRGRLVDEQLMSTIINSHHWQLRISDVSYEEREDVYGELEARGLSGDSLRKLPCYIMSSEMVRRQVTHCTICLQDIKTGEITRSLPKCDHTFHLVCVDKWLIRHGSCPICRQAVKD

SEQ ID NO: 36 - protein, 223 aa, Zea mays
  misc_feature (1)..(223): Ceres CLONE ID no. 1382382
  misc_feature (1)..(223): Functional Homolog of  Ceres CDNA ID no. 23360114 at SEQ ID NO. 35 with e-value of 6.60E-103 and percent identity of 87.8
MDAIFSPAVEPEGATDSTIDTVSRLVSGAFSRALTGFFAMAGAFTGAVTGAVAGRAAQYGVLRGAALGAVAGAILSVEVLEASRAYWYLELSGSRGPSSMADFVEQLFRGRLVEEQLMSTMIQSHHWQLRISDVSYEERDDVYSELEPRGLSGDSLRKLPCYIMSSEMTKKQIIHCTICLQDVAVGEITRSLPRCDHTFHLVCVDKWLIRHGSCPICRQAVKD

SEQ ID NO: 37 - protein, 222 aa, Zea mays
  misc_feature (1)..(222): Ceres CLONE ID no. 1561543
  misc_feature (1)..(222): Functional Homolog of  Ceres CDNA ID no. 23360114 at SEQ ID NO. 35 with e-value of 4.20E-53 and percent identity of 61.5
MELAEAPAPVPDEDGLDERGVALHLPRLLAGVVSGALTGIFALAGALTGAVTGAVAGRASDSGGVLRGAGLGAVAGAVLSIEVLEASRAYWCSSDRLGSHGGASSMADFIEQLLRARFVQEQFTASGYASYRWQDDLYDIFGDISSEGLSQESLKKLPHHVVSDHQTRDLLGEILCCPICLQDIVAGETARRLPGCSHAFHQPCVDRWLVGHGSCPVCRQRV

SEQ ID NO: 38 - protein, 220 aa, Oryza sativa subsp. japonica
  misc_feature (1)..(220): Public GI no. 51964362
  misc_feature (1)..(220): Functional Homolog of  Ceres CDNA ID no. 23360114 at SEQ ID NO. 35 with e-value of 2.10E-60 and percent identity of 59.5
MEVAAAEDALEESGVAVYLPRLLAGVISGALTGLFALAGALTGAVTGALAGRASDSGVLRGAGLGAFAGAVLSIEVLEASRAYWCSDRLGSHGTSSMADFIEQLLQARFVQEQIVPSGYATHRWQVSISDFGHDDLYDIFGDCSSKGLSRESLNKLPHYVVTDQTRNSFGEDLSCTICLQDIVTGETARRLPNCSHTFHQPCVDKWLVGHGSCPVCRQCV

SEQ ID NO: 39 - protein, 210 aa, Glycine max
  misc_feature (1)..(210): Ceres CLONE ID no. 557109
  misc_feature (1)..(210): Functional Homolog of  Ceres CDNA ID no. 23360114 at SEQ ID NO. 35 with e-value of 1.90E-57 and percent identity of 57.3
METGIIQGPWGFRSLSKFVLCTISGALTVCFALAGALTGAIAGALAAKATKSGLLRGVSLGAIAGSILSVEVLEASRAYWCMEQTGSRSASSMADFIEELVRGRLVEESLTPAILTAYNLQVGIANTGYVETHDVHGLVAPRGLSGDSLKRLPHHMISKAENTCCAICLQDIEVGEIARSLPRCHHTFHLICVDKWLVKNDSCPVCRQNV

SEQ ID NO: 40 - protein, 250 aa, Oryza sativa subsp. japonica
  misc_feature (1)..(250): Public GI no. 50912679
  misc_feature (1)..(250): Functional Homolog of  Ceres CDNA ID no. 23360114 at SEQ ID NO. 35 with e-value of 2.10E-42 and percent identity of 56.9
MEVAAAEDALEESGVAVYLPRLLAGVISGALTGLFALAGALTGAVTGALAGRASDSGVLRGAGLGAFAGAVLSIEVLEASRAYWCSDRLGSHGTSSMADFIEQLLQARFVQEQIVPSGYATHRWQVSISDFGHDDLYDIFGDCSSKGLSRESLNKLPHYVVTDQTRNSFGEDLSCTICLQVHLSKLALCCRQTCLAALHNFAHGLGSTTIIKAKQHPFHDCRQYSECLVSIFELSPFWQSLLRKSRSPVI

SEQ ID NO: 41 - protein, 222 aa, Oryza sativa subsp. japonica
  misc_feature (1)..(222): Public GI no. 51535177
  misc_feature (1)..(222): Functional Homolog of  Ceres CDNA ID no. 23360114 at SEQ ID NO. 35 with e-value of 1.20E-46 and percent identity of 52.6
MEVAPAAAMTRAEEESRRRAATRLPRLLRGVVSGMLTGIFAVAGGLTGAVTGALAGRASDGGVLRGAGLGTFAGAVLSIEILEASRAYWCQDRSSSPGSLSMGDFVKQLIHARFVQEQNEASGHITYRWQVGIADVVNGAVHEILGDVPSGEGLSKYSLMKLPYHVVIDHNNGSIGESLSCPVCLQDVVAGQTVRRLPKCSHTFHQPCVDKWLVGHGSCPMY

SEQ ID NO: 42 - protein, 234 aa, Triticum aestivum
  misc_feature (1)..(234): Ceres CLONE ID no. 888753
  misc_feature (1)..(234): Functional Homolog of  Ceres CDNA ID no. 23360114 at SEQ ID NO. 35 with e-value of 8.20E-34 and percent identity of 35.2
MEAAVARADTAAFFSGQEDAAGGSISRLPARVAGSIVRGVITFIFATVGTILGAITGGMIGLATESGLVRGAGIGAISGAVVAMEVVDRSMAMWRSDECGIWSVLYVLDVIWSLLTGRLVREKVDPAVQNAVDSQMNAAGDGFSDSPPTLSEMFDMGSASFKGMAADAIAELPATTITEQQAAVQDGGCSVCLQEFEAGEAARSLPECRHTFHMSCIDGWLCRHASCPLCRRAV

SEQ ID NO: 43 - DNA, 545 bp, Arabidopsis thaliana
  misc_feature (1)..(545): Ceres CDNA ID no. 23366941
  misc_feature (1)..(545): Also Known As Ceres GEMINI ID 532A7
  misc_feature (1)..(545): Also Known As Ceres CLONE ID 18663
aacaacacattcataaatctctcaaagtaagaactaagagctttactacagtcctactctctacacatcttctctctctctcaagagctagtcatggccaaactcataacttcttttctcttactcacaattttattcactttcgtttgtctcactatgtcaaaagaagctgagtaccatccagaaagttatggaccaggaagtctgaaatcataccaatgtggaggacaatgcacaaggagatgtagcagtacaaagtatcataagccatgcatgttcttctgccaaaagtgttgtgctaaatgcctttgtgtccctccaggcacgtacggcaacaaacaagtgtgtccttgttacaacaactggaagactcaacaaggtggaccaaaatgtccataaacaaaaagagagaaaccccaatctgtttcctattttatttaattatttccagtatgcttttgttgtcgtgatggttaaattatagtgtttttgcaggtatcatttatcatcgataaacaatatcatataaaatcttctatgtttcg

SEQ ID NO: 44 - protein, 101 aa, Arabidopsis thaliana
  misc_feature (1)..(101): Ceres CDNA ID no. 23366941
  misc_feature (1)..(101): Also Known As Ceres GEMINI ID 532A7
  misc_feature (1)..(101): Also Known As Ceres CLONE ID 18663
  misc_feature (1)..(101): Pfam Name: GASA; Pfam Description: Gibberellin regulated protein
MAKLITSFLLLTILFTFVCLTMSKEAEYHPESYGPGSLKSYQCGGQCTRRCSSTKYHKPCMFFCQKCCAKCLCVPPGTYGNKQVCPCYNNWKTQQGGPKCP

SEQ ID NO: 45 - protein, 80 aa, Arabidopsis thaliana
  misc_feature (1)..(80): Public GI no. 12324817
  misc_feature (1)..(80): Functional Homolog of  Ceres CDNA ID no. 23366941 at SEQ ID NO. 44 with e-value of 1.79E-45 and percent identity of 98.75
MSKEAEYHPESYGPGSLKSYQCGGQCTRRCSNTKYHKPCMFFCQKCCAKCLCVPPGTYGNKQVCPCYNNWKTQQGGPKCP

SEQ ID NO: 46 - protein, 106 aa, Pelargonium zonale
  misc_feature (1)..(106): Public GI no. 55584076
  misc_feature (1)..(106): Functional Homolog of  Ceres CDNA ID no. 23366941 at SEQ ID NO. 44 with e-value of 9.99E-36 and percent identity of 69.3
MAKCIALFLLALIALSMLQTMVMASNGELGQSLSKNRYGPGSLKSSQCNPECTRRCSKTQYHKPCMFFCQKCCRKCLCVPPGFYGNKAVCPCYNNWKTQQGGPKCP

SEQ ID NO: 47 - protein, 143 aa, Zea mays
  misc_feature (1)..(143): Ceres CLONE ID no. 303971
  misc_feature (1)..(143): Functional Homolog of  Ceres CDNA ID no. 23366941 at SEQ ID NO. 44 with e-value of 7.60E-31 and percent identity of 68.3
MKRGSPWSLRLLICCAAMVAIALLPQQGGQAACFVPTPGPAPAPPGSSATNTNDSSAAPRPAKPSAFPPPMYGGVTPGSLQPHECGGRCAGRCSATAYQKPCLFFCRKCCAACLCVPPGTYGNKNTCPCYNNWKTKRGGPKCP

SEQ ID NO: 48 - protein, 143 aa, Zea mays
  misc_feature (1)..(143): Ceres CLONE ID no. 1633647
  misc_feature (1)..(143): Functional Homolog of  Ceres CDNA ID no. 23366941 at SEQ ID NO. 44 with e-value of 9.69E-31 and percent identity of 68.3
MESKSPWSLRLLVCCAAIVAVALLSQQGGQAACFVPTPGPAPAPPGSSATNTNDSSAAPRPAKPSAFQPPMYGGVTPGSLQPHECGGRCAGRCSATAYQKPCLFFCRKCCAACLCVPPGTYGNKNTCPCYNNWKTKLGGPKCP

SEQ ID NO: 49 - protein, 143 aa, Zea mays; identical to SEQ ID NO: 47
  misc_feature (1)..(143): Ceres CLONE ID no. 314456
  misc_feature (1)..(143): Functional Homolog of  Ceres CDNA ID no. 23366941 at SEQ ID NO. 44 with e-value of 7.60E-31 and percent identity of 68.3

SEQ ID NO: 50 - protein, 104 aa, Petunia x hybrida
  misc_feature (1)..(104): Public GI no. 16516825
  misc_feature (1)..(104): Functional Homolog of  Ceres CDNA ID no. 23366941 at SEQ ID NO. 44 with e-value of 3.89E-34 and percent identity of 65.3
MAKLASFFLLALIAISIVATTALAADGQYHLDAARYGPGSLKPTQCLPQCIRRCSHTQYHNACMLFCQKCCKKCLCVPPGFYGNKGVCPCYNNWKTKEGGPKCP

SEQ ID NO: 51 - protein, 107 aa, Triticum aestivum
  misc_feature (1)..(107): Ceres CLONE ID no. 780025
  misc_feature (1)..(107): Functional Homolog of  Ceres CDNA ID no. 23366941 at SEQ ID NO. 44 with e-value of 4.99E-34 and percent identity of 65.0
MAKFFAAMILALFAISILQTVVMAANEQGGHLYDNKSKYGSGSVKSYQCPSQCSRRCSQTQYHKPCMFFCQKCCRKCLCVPPGYYGNKAVCPCYNNWKTKEGGPKCP

SEQ ID NO: 52 - protein, 107 aa, Triticum aestivum; identical to SEQ ID NO: 51
  misc_feature (1)..(107): Ceres CLONE ID no. 1000657
  misc_feature (1)..(107): Functional Homolog of  Ceres CDNA ID no. 23366941 at SEQ ID NO. 44 with e-value of 4.99E-34 and percent identity of 65.0

SEQ ID NO: 53 - protein, 105 aa, Petunia x hybrida
  misc_feature (1)..(105): Public GI no. 16516823
  misc_feature (1)..(105): Functional Homolog of  Ceres CDNA ID no. 23366941 at SEQ ID NO. 44 with e-value of 1.70E-33 and percent identity of 64.3
MAKLVPIFLLALFVISMFATTVLASHDPKRGHHHKGYGPGSLKPSQCLPQCTRRCSQTQYHNACMLFCQKCCNKCLCVPPGFYGNKGVCPCYNNWKTKEGGPKCP

SEQ ID NO: 54 - protein, 110 aa, Picea mariana
  misc_feature (1)..(110): Public GI no. 2982285
  misc_feature (1)..(110): Functional Homolog of  Ceres CDNA ID no. 23366941 at SEQ ID NO. 44 with e-value of 1.79E-31 and percent identity of 64.3
MARLQSFAVLLITIFALFIWNIEAALPHSNVDPFMEQKQGQYGEGSLRPSECGQRCSYRCSATSHKKPCMFFCQKCCAKCLCVPPGTFGNKQVCPCYNNWKTQQGGPKCP

SEQ ID NO: 55 - protein, 106 aa, Brassica napus
  misc_feature (1)..(106): Ceres CLONE ID no. 963426
  misc_feature (1)..(106): Functional Homolog of  Ceres CDNA ID no. 23366941 at SEQ ID NO. 44 with e-value of 5.80E-33 and percent identity of 64.3
MAKSYGTLFLLALIVFSLLQTMVMASSGSRVKYNPKRYGPGSLKRSQCPKECDRRCSQTQYHNACILFCNKCCRKCLCVPPGYYGNKQVCSCYNNWKTQEGGPKCP

SEQ ID NO: 56 - protein, 107 aa, Glycine max
  misc_feature (1)..(107): Ceres CLONE ID no. 682557
  misc_feature (1)..(107): Functional Homolog of  Ceres CDNA ID no. 23366941 at SEQ ID NO. 44 with e-value of 2.79E-33 and percent identity of 64.0
  misc_feature (102)..(102): Xaa is any aa, unknown, or other
MAKFFAAMILALFAISILQTVVMAANEQGGHLYDNKSKYGSGSVKSYQCPSQCSRRCSQTQYHKPCMFFCQKCCRKCLCVPPGYYGNKAVCPCYNNWKTKEXGPKCP

SEQ ID NO: 57 - protein, 106 aa, Glycine max
  misc_feature (1)..(106): Ceres CLONE ID no. 646744
  misc_feature (1)..(106): Functional Homolog of  Ceres CDNA ID no. 23366941 at SEQ ID NO. 44 with e-value of 3.09E-34 and percent identity of 63.3
MAMAKLVCVLLLAFLGISMITTQVMATDSAYHLDGRSYGPGSLKTSQCPSECTRRCSQTQYHKPCMFFCQECCKVCLCVPPGYYGNKSVCPCYNNWKNKRGGPKCP

SEQ ID NO: 58 - protein, 117 aa, Pelargonium zonale
  misc_feature (1)..(117): Public GI no. 59042581
  misc_feature (1)..(117): Functional Homolog of  Ceres CDNA ID no. 23366941 at SEQ ID NO. 44 with e-value of 9.69E-31 and percent identity of 63.2
MAAKKLCIVIFPLVIMFLLLQDNFATSSSITEAPSPQPHSQSNHTMYGITEGSLQPQECGPRCSERCSNTQYKKPCLFFCNKCCAKCLCVPPGTYGNKQFCPCYNNWKTKRGGPKCP

SEQ ID NO: 59 - protein, 107 aa, Glycine max
  misc_feature (1)..(107): Ceres CLONE ID no. 602368
  misc_feature (1)..(107): Functional Homolog of  Ceres CDNA ID no. 23366941 at SEQ ID NO. 44 with e-value of 2.20E-33 and percent identity of 63.0
MAKFFAAMILALIAISMLQTVVMAANEQGGHLYDNKSKYGSGSVKRYQCPSQCSRRCSQTQYHKPCMFFCQKCCRKCLCVPPGYYGNKAVCPCYNNWKTKEGGPKCP

SEQ ID NO: 60 - protein, 110 aa, Glycine max
  misc_feature (1)..(110): Ceres CLONE ID no. 566082
  misc_feature (1)..(110): Functional Homolog of  Ceres CDNA ID no. 23366941 at SEQ ID NO. 44 with e-value of 2.39E-34 and percent identity of 61.3
MAVANKLLSVLIIALIAISMLQTVVMASHGHGGHHYNDKKKYGPGSLKSFQCPSQCSRRCGKTQYHKPCMFFCQKCCRKCLCVPPGYYGNKAVCPCYNNWKTKEGGPKCP

SEQ ID NO: 61 - protein, 106 aa, Brassica napus
  misc_feature (1)..(106): Ceres CLONE ID no. 1114184
  misc_feature (1)..(106): Functional Homolog of  Ceres CDNA ID no. 23366941 at SEQ ID NO. 44 with e-value of 6.59E-32 and percent identity of 58.0
MAKSCGALFLLALVVFSLLQTMVMASSGSGGKYNSKRYGPGSLKRSQCPKECDRRCSQTQYHNACILFCNKCCRKCLCVPPGYYGNKQVCSCYNNWKTQQGGPKCP

SEQ ID NO: 62 - DNA, 865 bp, Arabidopsis thaliana
  misc_feature (1)..(865): Ceres CDNA ID no. 23371050
  misc_feature (1)..(865): Also Known As Ceres GEMINI ID 532G5
  misc_feature (1)..(865): Also Known As Ceres CLONE ID 250132
attgtcaatttccctttattttctcgacggaatcataaataaaaaccctaaacctaaagtcacaaattcattcttcatctgttattcacgatttgtgttgtcttttcttttgcagtaagatttcgactttagaattgggagatctttccattatgggttctgagcaaaacgacagcacaagcttctctccttcagagccaaagctctgcgtcaaaggatgtggcttcttcggatctccatcgaacatgaacctctgctctaaatgctaccagagacatccgagccacggaggaacaaaccgcttccgctaaagccgccgtcgagaaatctctaaaccctaataaacccaaaactcaaccacaacagagccaagaaatcactcaaggcgtcctcggatctggatcgtcttcctcatcaacgagagggggtgattcggctgctgctccgttggatccaccgaaatcgacggctacgagatgcttgagctgtaacaagaaagttggcgtgacgggtttcaagtgtaggtgtggaagcactttctgtggaactcatagatatccagagagtcacgagtgccaattcgatttcaaaggagttgcgagagaagctattgctaaagctaatcctgtggtgaaggctgataaggttgataggatatgaattggtgaagaaactgttgtgttctcttttgtttttttattttcaagtctcgtgatgttggtggtttggctctctgttttctgctcttattatggttttatttgcttttagggtttcttaggaaaggccttagattctgctattatgtggtttcatgttttgcaacattggatttgttgttctgtaataaagtgttggttatatt

SEQ ID NO: 63 - protein, 168 aa, Arabidopsis thaliana
  misc_feature (1)..(168): Ceres CDNA ID no. 23371050
  misc_feature (1)..(168): Also Known As Ceres GEMINI ID 532G5
  misc_feature (1)..(168): Also Known As Ceres CLONE ID 250132
  misc_feature (109)..(149): Pfam Name: zf-AN1; Pfam Description: AN1-like Zinc finger
  misc_feature (16)..(40): Pfam Name: zf-A20; Pfam Description: A20-like zinc finger
MGSEQNDSTSFSPSEPKLCVKGCGFFGSPSNMNLCSKCYRDIRATEEQTASAKAAVEKSLNPNKPKTQPQQSQEITQGVLGSGSSSSSTRGGDSAAAPLDPPKSTATRCLSCNKKVGVTGFKCRCGSTFCGTHRYPESHECQFDFKGVAREAIAKANPVVKADKVDRI

SEQ ID NO: 64 - protein, 172 aa, Brassica napus
  misc_feature (1)..(172): Ceres CLONE ID no. 962327
  misc_feature (1)..(172): Functional Homolog of  Ceres CDNA ID no. 23371050 at SEQ ID NO. 63 with e-value of 2.40E-50 and percent identity of 65.0
  misc_feature (143)..(143): Xaa is any aa, unknown, or other
  misc_feature (151)..(151): Xaa is any aa, unknown, or other
MSSEQNNSTSFPPTEPKLCDNGCGFFGSPSNMNLCSKCYRSLRAEEDQTAVAKAAVKNSLKLPSCSLIITPEQKQPLETKPASVVVTAEPSSVPIATGQEEAEPSKPARTNRCFSCNKKVGVMGFKCKCGSTFCGSHRYPEKXECSFDFKXVGRDAIAKANPVIKADKVERI

SEQ ID NO: 65 - protein, 158 aa, Glycine max
  misc_feature (1)..(158): Ceres CLONE ID no. 1101577
  misc_feature (1)..(158): Functional Homolog of  Ceres CDNA ID no. 23371050 at SEQ ID NO. 63 with e-value of 5.39E-37 and percent identity of 54.9
MAEEHRCQAPRFCANNCGFFGSPATQNMCSKCYRDFQLKEQQSSNAKMVLNQSLVPSPPPAVISQPSSSSSAAVDPSSAVVDDAPRESEEVKAPQQNRCMTCRRRVGLTGFKCRCGMMLCGTHRYPEQHACEFDFKGMGREQIAKANPVVKGEKLDKI

SEQ ID NO: 66 - protein, 160 aa, Triticum aestivum
  misc_feature (1)..(160): Ceres CLONE ID no. 634261
  misc_feature (1)..(160): Functional Homolog of  Ceres CDNA ID no. 23371050 at SEQ ID NO. 63 with e-value of 4.09E-32 and percent identity of 49.6
MAQESWKESEETVQTPEAPILCVNNCGFFGSSMTNNMCSKCYRDFIKATTMAAPVVEKKVFSVASSSSVTLEQAKADEVPAVAVADSQAAQEPPKPPSNRCLSCRKKIGLTGFQCRCGGTFCSMHRYADSHECTFDYKKAGREQIAKQNPVVIAKKINKI

SEQ ID NO: 67 - protein, 173 aa, Prunus armeniaca
  misc_feature (1)..(173): Public GI no. 5031281
  misc_feature (1)..(173): Functional Homolog of  Ceres CDNA ID no. 23371050 at SEQ ID NO. 63 with e-value of 3.79E-29 and percent identity of 47.0
MEHEETGCQPHPEGPILCVNNCGFFGSVATRNMCSKCHKDMMLKEEQAKLAASSFGNIVNGTSNSNGNEPVVAAGVDVQAHLVEPKTISLQPSFSFGSGSGGSGEAKPEGPKRCGTCNKRVGLTGFNCRCGHLFCAVHRYSDKHDCPYDYHTAARDVIAKANPVVKADKLEKI

SEQ ID NO: 68 - protein, 171 aa, Oryza sativa subsp. indica
  misc_feature (1)..(171): Public GI no. 35187687
  misc_feature (1)..(171): Functional Homolog of  Ceres CDNA ID no. 23371050 at SEQ ID NO. 63 with e-value of 3.60E-31 and percent identity of 38.7
MEHKETGCQQPKGPILCINNCGFFGSAATMNMCSKCHKEMIMKQEQAKLAASSIDSIVNGGDSGKEPIIAGHAEVAVAQVEVKTLVAQPAEIAGPSEGVTVNPKGREGPNRCSTCRKRVGLTGFNCRCGNLYCAMHRYSDKHDCQFDYRTAARDAIAKANPVVKAEKLDKI

SEQ ID NO: 69 - protein, 160 aa, Oryza sativa subsp. japonica
  misc_feature (1)..(160): Public GI no. 34978689
  misc_feature (1)..(160): Functional Homolog of  Ceres CDNA ID no. 23371050 at SEQ ID NO. 63 with e-value of 2.20E-33 and percent identity of 51.3
MAQESWKKEAEETGVHTPEAPILCVNNCGFFGSRMTENMCSKCYRDTVKAKTVATVVEKKPLASLSSTPLVTEVTDGGSGSVADGKQVMEEDTPKPPSNRCLSCRKKVGLTGFKCRCGGTFCSMHRYADSHKCTFDYKQVGREQIAKQNPLVKADKITKI

SEQ ID NO: 70 - protein, 165 aa, Oryza sativa subsp. japonica
  misc_feature (1)..(165): Public GI no. 34909836
  misc_feature (1)..(165): Functional Homolog of  Ceres CDNA ID no. 23371050 at SEQ ID NO. 63 with e-value of 5.19E-6 and percent identity of 41.67
MSSEQQASAGQPVLCASGCGFYGNPATLDMCSVCYRQHCLLNGATMATGPSSSVAAASAATVATGAVTSDSCSVPSAEVNGAAFSSKNNPEPATVVEKKAPANRCASCKKKVGLLGFACRCGATYCGTHRYPEKHACGFDFKGASRDAIARANPLIKGEKLTNKI

SEQ ID NO: 71 - DNA, 615 bp, Arabidopsis thaliana
  misc_feature (1)..(615): Ceres CDNA ID no. 23383878
  misc_feature (1)..(615): Also Known As Ceres GEMINI ID 531D2
  misc_feature (1)..(615): Also Known As Ceres CLONE ID 25571
gattcaccataaacaaaaagaatttgaaccaacaaagcaaaacatgaaaggcacattcactaacttgcttgtgctcctcctcattgcacttgtttgtgccaatgtcggtgctaggaaagttatctccgaagatacccaattcaaggatgaaaaatctttcctcggaggcagtggcagcggtgatggcttagggcttggccttggtggaggagctggtcttggtgggcttgggattggggctgggatcggcgcgggagccggactagggttaggtggaggcggtggtggactcggaggtggtggcggtggactcctcggtggaggcggctttgggggaggagccggtggcggactcggtggccttccttgaacgtattgacaagtgtgcgtgtgagagctgattctcagcttattactaattaattaagttactttcattctcttaataaaatctagagggtttgaatttcggatttcttcagctttaatttaaacttcaatatttgaaccaaaaaaggtcttagctactagaggtaatgctcgtaatcgtattatgtgtaacgccggttctgatattcttatgtgcaagtgtggaacgtttctcttttattcact

SEQ ID NO: 72 - protein, 108 aa, Arabidopsis thaliana
  misc_feature (1)..(108): Ceres CDNA ID no. 23383878
  misc_feature (1)..(108): Also Known As Ceres GEMINI ID 531D2
  misc_feature (1)..(108): Also Known As Ceres CLONE ID 25571
MKGTFTNLLVLLLIALVCANVGARKVISEDTQFKDEKSFLGGSGSGDGLGLGLGGGAGLGGLGIGAGIGAGAGLGLGGGGGGLGGGGGGLLGGGGFGGGAGGGLGGLP

SEQ ID NO: 73 - protein, 107 aa, Arabidopsis thaliana
  misc_feature (1)..(107): Ceres CLONE ID no. 94850
  misc_feature (1)..(107): Functional Homolog of  Ceres CDNA ID no. 23383878 at SEQ ID NO. 72 with e-value of 6.99E-28 and percent identity of 98.3
MASSSIALFLALNLLFFTTISACGSCTPCGGGCPSPKPKPTPKPTPELGLGVGGGAGLGGLGIGAGIGAGAGLGLGGGGGGLGGGGGGLLGGGGFGGGAGGGLGGLP

SEQ ID NO: 74 - protein, 108 aa, Arabidopsis thaliana
  misc_feature (1)..(108): Public GI no. 21689807
  misc_feature (1)..(108): Functional Homolog of  Ceres CDNA ID no. 23383878 at SEQ ID NO. 72 with e-value of 8.80E-53 and percent identity of 98.1
MKGTFTNLLVLLLIALVCANVGARKLISEDTQFKDEKSFLGGGGSGDGLGLGLGGGAGLGGLGIGAGIGAGAGLGLGGGGGGLGGGGGGLLGGGGFGGGAGGGLGGLP

SEQ ID NO: 75 - protein, 93 aa, Arabidopsis thaliana
  misc_feature (1)..(93): Public GI no. 18391322
  misc_feature (1)..(93): Functional Homolog of  Ceres CDNA ID no. 23383878 at SEQ ID NO. 72 with e-value of 5.79E-40 and percent identity of 97.8
MKGTFTNLLVLLLIALVCANVGARKLISEDTQFKDEKSFLGGGGSGDGLGLGLGGGAGLGGLGIGAGIGAGAGLGLGGGGFGGGAGGGLGGLP

SEQ ID NO: 76 - protein, 92 aa, Arabidopsis thaliana
  misc_feature (1)..(92): Ceres CLONE ID no. 17426
  misc_feature (1)..(92): Functional Homolog of  Ceres CDNA ID no. 23383878 at SEQ ID NO. 72 with e-value of 1.10E-40 and percent identity of 97.7
MKGTFTNLLVLLLIALVCANVGARKVISEDTQFKDEKSFLGGSGSGDGLGLGLGGGAGLGGLGIGAGIGAGAGLGLGGGGGGGAGGGLVGLP

SEQ ID NO: 77 - protein, 118 aa, Arabidopsis thaliana
  misc_feature (1)..(118): Ceres CLONE ID no. 11593
  misc_feature (1)..(118): Functional Homolog of  Ceres CDNA ID no. 23383878 at SEQ ID NO. 72 with e-value of 2.30E-38 and percent identity of 97.6
  misc_feature (65)..(65): Xaa is any aa, unknown, or other
  misc_feature (78)..(78): Xaa is any aa, unknown, or other
MKGTFTNLLVLLLIALVCANVGARKVISEDTQFKDEKSFLGGSGSGDGLGLGLGGGAGLGGLGIXAGIGAGAGLGLGXGGGGLGGVAVDSSLEAALGEEPVADSVAFLERIDKCACES

SEQ ID NO: 78 - protein, 98 aa, Brassica napus
  misc_feature (1)..(98): Ceres CLONE ID no. 1087844
  misc_feature (1)..(98): Functional Homolog of  Ceres CDNA ID no. 23383878 at SEQ ID NO. 72 with e-value of 1.40E-31 and percent identity of 81.4
MKGTFTNLLVLLFIALVCANVGARKLISGDTQFKDEKFLGGGGAGGGLGGIGIGAGINTGINAGIGLGGGGVGGGGLGGGGGGLLGGGGGLLGGGGLN

SEQ ID NO: 79 - protein, 109 aa, Brassica napus
  misc_feature (1)..(109): Ceres CLONE ID no. 963628
  misc_feature (1)..(109): Functional Homolog of  Ceres CDNA ID no. 23383878 at SEQ ID NO. 72 with e-value of 1.19E-34 and percent identity of 79.6
MKGTFTNLLVLLFIALVCANVGARKLISGDTQFKDEKFLGGGGGAGGGLGGIGIGAGINAGINAGIGGGLGGGGLGGGGGGLLGGGGGLLGGGGLDGGGGGLGGGGGFP

SEQ ID NO: 80 - DNA, 1123 bp, Arabidopsis thaliana
  misc_feature (1)..(1123): Ceres CDNA ID no. 23385144
  misc_feature (1)..(1123): Also Known As Ceres GEMINI ID 533B1
  misc_feature (1)..(1123): Also Known As Ceres CLONE ID 111598
aaaggttttcttataagatcccattcttgtagcaaaaacccagaagaacaaactttcgaagaagacgactaatcaattcatctgattatggagagactacagagaatcttcggagctggtggcggtttaggtcacgcatcgcctgattctccgactctcgatacatcggagcaggaagagctggtgttcctatggaagtcatgggattgatgcttggagagtttgtggatgagtacactgttagggttgtggatgtttttgcgatgcctcagagtggtactggtgttagtgttgaagctgttgatcatgttttccagactaatatgctcgacatgcttaaacagaccggaagacctgagatggtggttggttggtatcattcacatcctggattcggctgctggctttctggggttgacattaatactcaacagagttttgaagctttgaatcagcgagctgtagcagtggtggtagatccgattcagagtgtgaaaggaaaggtggtgattgatgcgttccgctccataaatccacagaccattatgcttgggcaggaaccccgtcaaacaacatcgaaccttgggcacttgaacaaaccatcgatccaggctttgattcacgggttgaacagacactattactcaatagcaatcaactataggaagaacgagcttgaggagaagatgttactcaacctccacaagaagaaatggacagatggtctgacgctaagacgctttgacacccactccaagaccaacgaacagacggtccaggagatgttgagcttggctgctaaatataacaaggcggttcaagaggaggacgagttgtcaccagagaagctggcaattgtgaatgtgggaagacaagatgcaaagaagcatctggaagaacatgtctcgaacctcatgtcatccaacattgttcagacactaggcactatgctcgacactgttgtcttctagagagcttacttctccagccgcttcaagtcattgagctttgttcttctgcatctctttggcttctactgaatgttctctttttatctgctagctttttacaaggttgtactgtactatgtgatttcgttcgttaagggcagggatcgatttct

SEQ ID NO: 81 - protein, 259 aa, Arabidopsis thaliana
  misc_feature (1)..(259): Ceres CDNA ID no. 23385144
  misc_feature (1)..(259): Also Known As Ceres GEMINI ID 533B1
  misc_feature (1)..(259): Also Known As Ceres CLONE ID 111598
  misc_feature (2)..(89): Pfam Name: Mov34; Pfam Description: Mov34/MPN/PAD-1 family
MEVMGLMLGEFVDEYTVRVVDVFAMPQSGTGVSVEAVDHVFQTNMLDMLKQTGRPEMVVGWYHSHPGFGCWLSGVDINTQQSFEALNQRAVAVVVDPIQSVKGKVVIDAFRSINPQTIMLGQEPRQTTSNLGHLNKPSIQALIHGLNRHYYSIAINYRKNELEEKMLLNLHKKKWTDGLTLRRFDTHSKTNEQTVQEMLSLAAKYNKAVQEEDELSPEKLAIVNVGRQDAKKHLEEHVSNLMSSNIVQTLGTMLDTVVF

SEQ ID NO: 82 - protein, 309 aa, Glycine max
  misc_feature (1)..(309): Ceres CLONE ID no. 473126
  misc_feature (1)..(309): Functional Homolog of  Ceres CDNA ID no. 23385144 at SEQ ID NO. 81 with e-value of 0.0 and percent identity of 96.53
MERLQRMFAGAGGALGHPPPDSPTLDSSEQVYISSLALLKMLKHGRAGVPMEVMGLMLGEFVDEYTVRVVDVFAMPQSGTGVSVEAVDHVFQTNMLDMLKQTGRPEMVVGWYHSHPGFGCWLSGVDINTQQSFEALNQRAVAVVVDPIQSVKGKVVIDAFRLINPQTMMLGQEPRQTTSNLGHLNKPSIQALIHGLNRHYYSIAINYRKNELEEKMLLNLHKKKWTDGLTLRHFDTHSKTNEQTVQEMLNLAVKYNKAVQEEDELPPEKLAIANVGRQDAKKHLEEHISNLMSSNIVQTLGMMLDTVVF

SEQ ID NO: 83 - protein, 307 aa, Oryza sativa subsp. japonica
  misc_feature (1)..(307): Public GI no. 54287494
  misc_feature (1)..(307): Functional Homolog of  Ceres CDNA ID no. 23385144 at SEQ ID NO. 81 with e-value of 3.39E-130 and percent identity of 95.37
MERLQRIFGASGMGQPPSDSPLLDSSEQVYISSLALLKMLKHGRAGVPMEVMGLMLGEFVDDYTVRVVDVFAMPQSGTGVSVEAVDHVFQTNMLDMLKQTGRPEMVVGWYHSHPGFGCWLSGVDINTQQSFEALNPRAVAVVIDPIQSVKGKVVIDAFRLINPQTMMLGQEPRQTTSNVGHLNKPSIQALIHGLNRHYYSIAINYRKNELEEKMLLNLHKKKWTDGLILKRFDTHSKTNEQTVQEMLNLAIKYNKAVQEEDELPPEKLAIANVGRQDAKKHLEEHVSNLMSSNIVQTLGTMLDTVVF

SEQ ID NO: 84 - protein, 307 aa, Zea mays
  misc_feature (1)..(307): Ceres CLONE ID no. 238614
  misc_feature (1)..(307): Functional Homolog of  Ceres CDNA ID no. 23385144 at SEQ ID NO. 81 with e-value of 2.60E-130 and percent identity of 95.37
MERLQRIFGASGMGQPPTDSPLLDSSEQVYISSLALLKMLKHGRAGVPMEVMGLMLGEFVDDYTVRVVDVFAMPQSGTGVSVEAVDHVFQTNMLDMLKQTGRPEMVVGWYHSHPGFGCWLSGVDINTQQSFEALNPRAVAVVIDPIQSVKGKVVIDAFRLINPQTMMLGQEPRQTTSNVGHLNKPSIQALIHGLNRHYYSIAINYRKNELEEKMLLNLHKKKWTDGLILKRFDTHSKTNEQTVQEMLNLAIKYNKAVQEEDELPPEKLAIANVGRQDAKKHLEEHVSNLMSSNIVQTLGTMLDTVVF

SEQ ID NO: 85 - protein, 307 aa, Oryza sativa subsp. japonica
  misc_feature (1)..(307): Public GI no. 34903124
  misc_feature (1)..(307): Functional Homolog of  Ceres CDNA ID no. 23385144 at SEQ ID NO. 81 with e-value of 1.39E-129 and percent identity of 94.98
MERLQRIFGASGMGQPPTDSPLLDSSEQVYISSLALLKMLKHGRAGVPMEVMGLMLGEFVDDYTVRVVDVFAMPQSGTGVSVEAVDHVFQTNMLDMLKQTGRPEMVVGWYHSHPGFGCWLSGVDINTQQSFEALNPRAVAVVIDPIQSVKGKVVIDAFRLINPQTMMLGQEPRQTTSNVGHLNKPSIQALIHGLNRHYYSIAINYRKNELEEKMLLNLHKKKWTDGLILKSFDTHSKTNEQTVQEMLNLAIKYNKAVQEEDELPPEKLAIANVGRQDAKKHLEEHVSNLMSSNIVQTLGTMLDTVVF

SEQ ID NO: 86 - protein, 308 aa, Oryza sativa subsp. japonica
  misc_feature (1)..(308): Public GI no. 53791918
  misc_feature (1)..(308): Functional Homolog of  Ceres CDNA ID no. 23385144 at SEQ ID NO. 81 with e-value of 4.99E-88 and percent identity of 67.18
MDANMLSAMMAAVGGDKPQPDTSEQINVSPLALLKMLKHGRAGVPMEVMGLMLGEFVDEYTVTVADVFAMPQSGTGVSVEAVDHAFQSEMLEMLRQTGRPEMVVGWYHSHPGFGCWLSGTDMATQQSFEQLHPRAVAVVIDPVQSVKGKVVMDAFRLVDHMAMVLGGAAGGEARQTTSNVGAVARPSAVALVHGLGRHYYSLAISYRMKEGEERMLACLSRSGWSDGFALRRFGAHDAGNEAAVRGMRDLAVGYGAQVREEDETPPERLAVVRAGKVDAKGKLEEKAMDAMSANIVQTLGMMLDTVTF

SEQ ID NO: 87 - DNA, 625 bp, Arabidopsis thaliana
  misc_feature (1)..(625): Ceres CDNA ID no. 23385649
  misc_feature (1)..(625): Also Known As Ceres GEMINI ID 532C5
  misc_feature (1)..(625): Also Known As Ceres CLONE ID 158734
atcttcatcgtttctcaatttcaaaactcagattaataaaattttcgcgttgttcctttctctcaattcatcgacgatgccgagcagatacccagaagcagtaacacaagactgggaaccagtagttctccacaaatcaaaacaaaagagccaagacctacgcgatccgaaagcggttaacgcagctctgagaaacggtgtcgcggttcaaacggttaagaaattcgatgccggttcgaacaaaaaggggaaatctacggcggttccggtgattaacacgaagaagctggaagaagaaacagagcctgcggcgatggatcgtgtgaaagcagaggtgaggttgatgatacagaaagcgagattggagaagaagatgtcacaagcggatttggcgaaacagatcaatgagaggactcaggtagttcaggaatatgagaatggtaaagctgttcctaatcaggctgtgcttgcgaagatggagaaggttctaggtgttaaacttaggggtaaaattgggaaatgattaaacgatgtcgtttatcttgtattttgttgaccaatgtaaaaagtaaaaaaaaagtcttgttgttttgtttgataaatgaaaaaacaatatatatctttt

SEQ ID NO: 88 - protein, 148 aa, Arabidopsis thaliana
  misc_feature (1)..(148): Ceres CDNA ID no. 23385649
  misc_feature (1)..(148): Also Known As Ceres GEMINI ID 532C5
  misc_feature (1)..(148): Also Known As Ceres CLONE ID 158734
  misc_feature (91)..(145): Pfam Name: HTH_3; Pfam Description: Helix-turn-helix
MPSRYPEAVTQDWEPVVLHKSKQKSQDLRDPKAVNAALRNGVAVQTVKKFDAGSNKKGKSTAVPVINTKKLEEETEPAAMDRVKAEVRLMIQKARLEKKMSQADLAKQINERTQVVQEYENGKAVPNQAVLAKMEKVLGVKLRGKIGK

SEQ ID NO: 89 - protein, 142 aa, Glycine max
  misc_feature (1)..(142): Ceres CLONE ID no. 474636
  misc_feature (1)..(142): Functional Homolog of  Ceres CDNA ID no. 23385649 at SEQ ID NO. 88 with e-value of 1.20E-32 and percent identity of 50.3
MSGVGPLSQDWEPVVLRKKAPTAAAKKDEKAVNAARRSGAEIETLKKYNAGTNKAASSSTSLNTKRLDDDTENLAHEKVPTELKKAIMQARMDKKLTQAQLAQLINEKPQVIQEYESGKAIPNQQIIGKLERALGAKLRGKK

SEQ ID NO: 90 - protein, 142 aa, Glycine max
  misc_feature (1)..(142): Ceres CLONE ID no. 1057375
  misc_feature (1)..(142): Functional Homolog of  Ceres CDNA ID no. 23385649 at SEQ ID NO. 88 with e-value of 3.19E-32 and percent identity of 51.8
MAGTGPMTQDWEPVVIRKRAPNSAAKRDEKTVNAARRAGADIETVRKYNAGTNKAASSSTSLNTKTLDDDTENLTHERVPTELKKAIMQARTEKKLTQSQLAQLINEKPQVIQEYESGKAIPNQQILSKLERALGAKLRGKK

SEQ ID NO: 91 - protein, 142 aa, Glycine max
  misc_feature (1)..(142): Ceres CLONE ID no. 1027534
  misc_feature (1)..(142): Functional Homolog of  Ceres CDNA ID no. 23385649 at SEQ ID NO. 88 with e-value of 4.09E-32 and percent identity of 48.8
MAGIGPIRQDWEPIVARKKAQNAADKKDEKAVNAARRSGAEIDTTKKYNAGTNKAASSGTSLNTKRLDDDTENLSHERVSSDLKKNLMQARLDKKMTQAQLAQMINEKPQVIQEYESGKAIPNNQIIGKLERALGAKLRSKK

SEQ ID NO: 92 - protein, 142 aa, Ricinus communis
  misc_feature (1)..(142): Public GI no. 1632831
  misc_feature (1)..(142): Functional Homolog of  Ceres CDNA ID no. 23385649 at SEQ ID NO. 88 with e-value of 5.80E-33 and percent identity of 51.8
MAGVGPISQDWEPVVIRKKAPTAAAKKDEKVVNAARRAGAEIETLKKSNAGTNKAASSSTSLNTRKLDEETENLTHDRVPTELKKAIMQARMEKKFTQAQLAQMINEKPQIIQEYESGKAIPNQQIIGKLERALGVKLRGKK

SEQ ID NO: 93 - protein, 146 aa, Lycopersicon esculentum
  misc_feature (1)..(146): Public GI no. 5669634
  misc_feature (1)..(146): Functional Homolog of  Ceres CDNA ID no. 23385649 at SEQ ID NO. 88 with e-value of 4.80E-45 and percent identity of 68.2
MPMRPTGGLKQDWDPIVLQKPKMKAQDLKDPKIVNQALRAGAQVQTVKKIDAGLNKKAATLAVNVRKLDEAAEPAALEKLPVDVRQAIQKARIEKKMSQADLAKKINERTQVVAEYENGKAVPNQLVLGKMENVLGVKLRGKIHKS

SEQ ID NO: 94 - protein, 139 aa, Solanum tuberosum
  misc_feature (1)..(139): Public GI no. 8895787
  misc_feature (1)..(139): Functional Homolog of  Ceres CDNA ID no. 23385649 at SEQ ID NO. 88 with e-value of 5.19E-32 and percent identity of 49.6
MSGISQDWEPVVIRKKAPTSAARKDEKAVNAARRSGAEIETVKKSNAGSNRAASSSTSLNTRKLDEDTENLSHEKVPTELKKAIMQARQDKKLTQSQLAQLINEKPQIIQEYESGKAIPNQQIISKLERALGAKLRGKK

SEQ ID NO: 95 - protein, 154 aa, Triticum aestivum
  misc_feature (1)..(154): Ceres CLONE ID no. 638899
  misc_feature (1)..(154): Functional Homolog of  Ceres CDNA ID no. 23385649 at SEQ ID NO. 88 with e-value of 3.29E-37 and percent identity of 60.4
MPTGRMSGNITQDWEPVVLRRAKPKAADLKSAKAVNQALRTGAPVETVRKAAAGTNKNASAAAVAAPARKLDEMTEPAGLGRVGGDVRAAIQKARVAKGWSQAELAKRVNERAQVVQEYESGKAVPVQAVLAKMERALEVKLRGKAVGAPAPTK

SEQ ID NO: 96 - protein, 153 aa, Zea mays
  misc_feature (1)..(153): Ceres CLONE ID no. 348434
  misc_feature (1)..(153): Functional Homolog of  Ceres CDNA ID no. 23385649 at SEQ ID NO. 88 with e-value of 6.89E-37 and percent identity of 63.1
MPTGRLSGNITQDWEPVVLRRTKPKAADLKSSKAVNQALRSGAAVETVRKSAAGMNKHSAAVAPARKLDETTEPAAVERVAVEVRAAIQKARVAKGWSQAELAKHINERAQVVQEYESSKAAPAQAVLAKMERALEVKLRGKGVGAPLAAVGK

SEQ ID NO: 97 - protein, 150 aa, Parthenium argentatum
  misc_feature (1)..(150): Ceres CLONE ID no. 1607224
  misc_feature (1)..(150): Functional Homolog of  Ceres CDNA ID no. 23385649 at SEQ ID NO. 88 with e-value of 3.49E-42 and percent identity of 67.6
MPTRPAGPVSQDWEPVVLHKSKPKSHVLHDTKSINQAIRSGAQVQTVKKHDGGTNKKSPATVIYARKLDEAEQPATIERVGTEVRQLIQKARIEKKMSQAELAKQINERTQVVQEYENGKAVPNQVVLGKMERVFGGVKALEGRYISDDV

SEQ ID NO: 98 - protein, 155 aa, Oryza sativa subsp. japonica
  misc_feature (1)..(155): Public GI no. 50725389
  misc_feature (1)..(155): Functional Homolog of  Ceres CDNA ID no. 23385649 at SEQ ID NO. 88 with e-value of 2.59E-37 and percent identity of 61.9
MPTGRLSGNITQDWEPVVLRRTKPKAADLKSTRAVNQAMRTGAPVETVRKAAAGTNKAAAGAAAPARKLDESTEPAGLGRVGAEVRGAIQKARVAKGWSQAELAKRINERAQVVQEYESGKAVPVQAVLAKMERALEVKLRGKAVGAPAAPAGAK

SEQ ID NO: 99 - protein, 145 aa, Retama raetam
  misc_feature (1)..(145): Public GI no. 19225065
  misc_feature (1)..(145): Functional Homolog of  Ceres CDNA ID no. 23385649 at SEQ ID NO. 88 with e-value of 9.09E-51 and percent identity of 75.1
MPTRATGTITQDWETVVLHKSKPKAQDLRNPKAISQALRAGAEVQTIKKFDAGSNEKTAGPVVYARKLDEAAEPAALERVAGEVRHAIQKARLEKKMSQAEVAKQINERPQVVQEYENGKAVPNQAVLAKMERVLGVKLRGKIGK

SEQ ID NO: 100 - DNA, 981 bp, Arabidopsis thaliana
  misc_feature (1)..(981): Ceres CDNA ID no. 23387851
  misc_feature (1)..(981): Also Known As Ceres GEMINI ID 532H5
  misc_feature (1)..(981): Also Known As Ceres CLONE ID 251466
agaacacaaacaaaaacacattgtaacattagtttaagcattaagcttctttatgtcgaataataataattctccgaccaccgtgaatcaagaaacgacgacgtctcgtgaagtctcaatcacattgcctactgatcaatctcctcaaacctcaccaggatcatcttcttctccttcaccgagaccttccggtggatcaccggcgagaagaacggcgactggattatccggcaagcactctattttcagggggattcgactacgtaacggaaaatgggtatcggagattagagagccacgtaaaacgacaagaatttggctcgggacttatccggtaccggagatggctgccgccgcttacgacgtggctgcgttagctttaaaaggaccaggccgttttgaattttcctggtttagctttgacttacgtggctccggtttcaaactctgctgcggatataagagcggctgctagtagagcagcggagatgaagcaaccggatcagggtggggatgagaaggtattggaaccggttcaacccggcaaagaggaagaattagaagaagtgtcgtgtaactcgtgttcgttggagtttatggatgaggaagcgatgttgaatatgccgactttgttgacggagatggctgaagggatgttgatgagtccaccgagaatgatgatacatccgacgatggaagatgattcgccggagaatcatgaaggagataatctttggagttataaatgaatccattgaagctgctctcttttttattgttttccggtcgaatgagattttccccctttttttttctttttgggtcgctgttatggaaagtcaaataggttattaatatgatctattaatatttttgaaacataatgagtttgaatttgaatttttccatttttatataaatatggtttatatgagggaaaaatagatacatatcgaagatataagaattgtttttctgctt

SEQ ID NO: 101 - protein, 140 aa, Arabidopsis thaliana
  misc_feature (1)..(140): Ceres CDNA ID no. 23387851
  misc_feature (1)..(140): Also Known As Ceres GEMINI ID 532H5
  misc_feature (1)..(140): Also Known As Ceres CLONE ID 251466
  misc_feature (63)..(113): Pfam Name: AP2; Pfam Description: AP2 domain
MSNNNNSPTTVNQETTTSREVSITLPTDQSPQTSPGSSSSPSPRPSGGSPARRTATGLSGKHSIFRGIRLRNGKWVSEIREPRKTTRIWLGTYPVPEMAAAAYDVAALALKGPGRFEFSWFSFDLRGSGFKLCCGYKSGC

SEQ ID NO: 102 - protein, 261 aa, Oryza sativa subsp. japonica
  misc_feature (1)..(261): Public GI no. 50253268
  misc_feature (1)..(261): Functional Homolog of  Ceres CDNA ID no. 23387851 at SEQ ID NO. 101 with e-value of 5.20E-22 and percent identity of 43.57
MADLTEHPSPTAPPQVQTAGLPAAASPGPASPHSPSEQGDKTAPGAATASTMTTASSGEPSPRSSGKHAFYRGIRCRSGKWVSEIREPRKARRIWLGTYPTAEMAAAAYDVAARALRGADAVLNFPGATASRPVPASASPADIRAAAAAAAAAAAHLERPHGPTGTAYPATAAAEHHQQQQQQQYGSGSPAADDVSGYPPMEGGIGNDDFMDEEAIFELPQLLRNMAAGMMMSPPRLSPTTSDVSPEPSEAGESLWSYRDP

SEQ ID NO: 103 - protein, 210 aa, Lycopersicon esculentum
  misc_feature (1)..(210): Public GI no. 45826359
  misc_feature (1)..(210): Functional Homolog of  Ceres CDNA ID no. 23387851 at SEQ ID NO. 101 with e-value of 5.70E-16 and percent identity of 38.46
MNIFETYYSDSLILTESSSSSSSSSFSEEEVILASNNPKKPAGRKKFRETRHPIYRGIRKRNSGKWVCEVREPNKKTRIWLGTFPTAEMAARAHDVAALALRGRSACLNFSDSAWRLPIPASSNSKDIQKAAAQAVEIFRSEEVSGESPETSENVQESSDFVDEEAIFFMPGLLANMAEGLMLPPPQCAEMGDHCVETDAYMITLWNYSI

SEQ ID NO: 104 - protein, 220 aa, Lycopersicon esculentum
  misc_feature (1)..(220): Public GI no. 45826360
  misc_feature (1)..(220): Functional Homolog of  Ceres CDNA ID no. 23387851 at SEQ ID NO. 101 with e-value of 1.20E-15 and percent identity of 36.23
MDIFESYYSNSFVESLLSSSLSISDTNNLNHYSPNEEVIILASNNPKKPAGRKKFRETRHPVYRGIRKRNSGKWVCEVREPNKKTRIWLGTFPTAEMAARAHDVAAIALRGRSACLNFADSVWRLPIPASSNSKDIQKAAAEAAEIFRSEEVSGESPETSENVQESSDFVDEEALFSMPGLLANMAEGLMLPPPQCLEIGDHYVELADVHAYMPLWNYSI

SEQ ID NO: 105 - protein, 216 aa, Gossypium hirsutum
  misc_feature (1)..(216): Public GI no. 37993864
  misc_feature (1)..(216): Functional Homolog of  Ceres CDNA ID no. 23387851 at SEQ ID NO. 101 with e-value of 1.89E-15 and percent identity of 38.17
MDFVVQDYDMVDSGSVSESGTDRPVNFSDEYVMLASSYPKRPAGRKKFRETRHPVYRGVRRRNPGKWVSEVREPNKKSRIWLGTFPKADMAARAHDVAAIALRGKSACLNFADSAWKLPVPASSDPKDIQKTVAEVAETFRTAEHSSGNSRNDAKRSENTEMEKGFYLDEEALFGTQRFWANMAAGMMMSPPRSGHDGGWEEHEVDDYVPLWSYSI

SEQ ID NO: 106 - protein, 205 aa, Glycine max
  misc_feature (1)..(205): Ceres CLONE ID no. 707775
  misc_feature (1)..(205): Functional Homolog of  Ceres CDNA ID no. 23387851 at SEQ ID NO. 101 with e-value of 2.59E-20 and percent identity of 51.67
  misc_feature (101)..(101): Xaa is any aa, unknown, or other
MDGNSFGNVPPPPIQVPDNLAISSSSSPTPTTSSPSPTPSGGFRYRGTRCRSGKWVSEIREPRKTNRIWLGTYPTAEMAAAAYDVAALALKGPDTPVNFPXSILSYPIPASLSSTDIRAAAAAAAQARIVRAPQESEETVNPDDGGQGLSERREEYIYEDELLNMPNLLDEMARGMQVSPLRITSYSSDDSPGNSDGDNLWSYTL

SEQ ID NO: 107 - protein, 229 aa, Cucumis melo
  misc_feature (1)..(229): Public GI no. 38257023
  misc_feature (1)..(229): Functional Homolog of  Ceres CDNA ID no. 23387851 at SEQ ID NO. 101 with e-value of 6.89E-20 and percent identity of 53.39
MSSSKEQSPSPETESSSSSSSDSNKKPKRINSNSSSNSKHAVYRGVRMRNWGKWVSEIREPRKKSRIWLGTFPSPEMAARAHDVAALSIKGNSAILNFPDLVHLLPRPVSLAPRDVQAAAAKAAHMHNLSSNANTNNHNTNSNSSSAFSDELSEIVELPALGTSYDGGVGVGGEFVFVESELESAAWLYQPPWVQSLQEDYDDIDGDGDCGKLGMGFVSNGFKGFLFDY

SEQ ID NO: 108 - protein, 215 aa, Capsicum annuum
  misc_feature (1)..(215): Public GI no. 37147896
  misc_feature (1)..(215): Functional Homolog of  Ceres CDNA ID no. 23387851 at SEQ ID NO. 101 with e-value of 3.99E-15 and percent identity of 31.85
MNIFRSYYSDPLTESSSSFSDSSIYSPNRAIFSDEEVILASNNPKKPAGRKKFRETRHPVYRGVRKRNSGKWVCEVREPNKKSRIWLGTFPTAEMAARAHDVAAIALRGRSACLNFADSAWRLPVPASSDTKDIQKAAAEAAEAFRPLKLEGISKESSSSTPESMFFMDEEALFCMPGLLTNMAEGLMLPPPQCAEIGDHVETADADTPLWSYSI

SEQ ID NO: 109 - protein, 216 aa, Thellungiella salsuginea
  misc_feature (1)..(216): Public GI no. 41351817
  misc_feature (1)..(216): Functional Homolog of  Ceres CDNA ID no. 23387851 at SEQ ID NO. 101 with e-value of 2.50E-15 and percent identity of 37.3
MNSFSAFAEMFGSEYESPVTVGGDYCPTLATSCPKKPAGRKKFRETRHPIYRGVRRRNSGKWVCEVREPNKKSRIWLGTFPTAEMAARAHDVAAIALRGRSACLNFADSAWRLRIPESTCAKDIQKAAAEAAVAFQAEMSDTMTSDHGLDMEETTVEVIVTEEEQSEGFYMDEEAMFGMPRLLANMAEGMLLPPPSVQWGHNYDCDGDADVSLWSY

SEQ ID NO: 110 - protein, 234 aa, Glycine soja
  misc_feature (1)..(234): Public GI no. 55824656
  misc_feature (1)..(234): Functional Homolog of  Ceres CDNA ID no. 23387851 at SEQ ID NO. 101 with e-value of 3.20E-15 and percent identity of 34.06
MFTLNHSSDLYHVSPELSSSLDTSSPASEGSRGVAFSDEEVRLAVRHPKKRAGRKKFRETRHPVYRGVRRRNSDKWVCEVREPNKKTRIWLGTFPTPEMAARAHDVAAMALRGRYACLNFADSAWRLPVPATAEAKDIQKAAAEAAQAFRPDQTLKNANTRQECVEAVAVAVADTTTATAQGVFYMEEEEQVLDMPELLRNMVLMSPTHCLGYEYEDADLDAQDAEVSLWNFSI

SEQ ID NO: 111 - protein, 231 aa, Hevea brasiliensis
  misc_feature (1)..(231): Public GI no. 66269671
  misc_feature (1)..(231): Functional Homolog of  Ceres CDNA ID no. 23387851 at SEQ ID NO. 101 with e-value of 2.29E-15 and percent identity of 52.1
MDVFPQYSDSLPFATHSCSLHYPESSTLSDTCSALRANLSDEEVLLASSYPKKRAGRKKFRETRHPIYRGVRRRNSGKWVCEIREPNKKSRIWLGTFPTEEMAARAHDVAALALRGRSACLNFADSSWRLPVPASREAKDIRKAAAEAAMAFQPEGTEGFSGELKQENKWTTESAPEDVFYMDEEAVFAMPGLLASMAEGMLLPPPQCVAGSGGEDGEMDAADVSLWSFSI

SEQ ID NO: 112 - protein, 225 aa, Oryza sativa
  misc_feature (1)..(225): Public GI no. 33638194
  misc_feature (1)..(225): Functional Homolog of  Ceres CDNA ID no. 23387851 at SEQ ID NO. 101 with e-value of 6.39E-17 and percent identity of 42.4
MDDSSFGSEPTTSSSGGEAPASPPSTASSSSDGAGGKKKRPRKDGHHPTYRGVRMRSWGKWVSEIREPRKKSRIWLGTFATAEMAARAHDVAALAIKGRAAHLNFPDLAHELPRPATAAPKDVQAAAALAAAADFPASSANAGASNNPDGSDDASAGSASPPPPPDAADDALFDLPDLLLDLRYGPPSSGLSCASSWEDEVGLISGAGAAAAGVFRLEEPLLWEY

SEQ ID NO: 113 - protein, 281 aa, Zea mays
  misc_feature (1)..(281): Public GI no. 21908034
  misc_feature (1)..(281): Functional Homolog of  Ceres CDNA ID no. 23387851 at SEQ ID NO. 101 with e-value of 1.30E-18 and percent identity of 41.43
MAQELHETSSCSATTTSSCTTSCCSSTVTDSSSSPPSPAAANAAPATRKRQALEAEAEAEAGGEEEEEEEEGCAGNKAAPAKKRPRGSEGKHPTFRGVRMRAWGKWVSEIREPRKKSRIWLGTFPTAEMAARAHDVAALAIKGRAAHLNFPDLAGALPRAASAAPKDVQAAAALAAAFTSPSSEPGAGAHEEPAAKDGAAPEEAAADAQAPVPVALPPPAASRPGTPSSGVEDERQLFDLPDLLLDIRDGFGRFPPMWAPLTDVEDVVNAELRLEEPLLWE

SEQ ID NO: 114 - DNA, 509 bp, Arabidopsis thaliana
  misc_feature (1)..(509): Ceres CDNA ID no. 23387900
  misc_feature (1)..(509): Also Known As Ceres GEMINI ID 531B3
  misc_feature (1)..(509): Also Known As Ceres CLONE ID 18215
aactcatcacttacttaacatactaagagagttattagaacttgcaaaaaatggcttccaaggctttgattctgttaggtctcttctcagttcttctcgtcgtctccgaagtgtctgccgcaaggcaatcgggcatggtgaagccagagagtgaggaaactgtgcaacctgaaggttatggcggtggccacggaggacatggtggtcacggagggggaggaggccacggacatggaggacacaacggaggagggggccacggacttgacggatacggaggaggtggaggacactatggaggaggtggaggacactacggaggaggtggaggaggatacggaggtggaggaggacaccacggaggaggaggccacgggctaaacgaacctgttcagactaagccgggtgtttaaaactatataatatcttcactaccatgcatgattgcatatatatatatacgcttatgtattatctatatgcctataaataaaccatggtgagtttgt

SEQ ID NO: 115 - protein, 120 aa, Arabidopsis thaliana
  misc_feature (1)..(120): Ceres CDNA ID no. 23387900
  misc_feature (1)..(120): Also Known As Ceres GEMINI ID 531B3
  misc_feature (1)..(120): Also Known As Ceres CLONE ID 18215
  misc_feature (1)..(100): Pfam Name: GRP; Pfam Description: Glycine rich protein family
MASKALILLGLFSVLLVVSEVSAARQSGMVKPESEETVQPEGYGGGHGGHGGHGGGGGHGHGGHNGGGGHGLDGYGGGGGHYGGGGGHYGGGGGGYGGGGGHHGGGGHGLNEPVQTKPGV

SEQ ID NO: 116 - protein, 133 aa, Arabidopsis thaliana
  misc_feature (1)..(133): Ceres CLONE ID no. 118184
  misc_feature (1)..(133): Functional Homolog of  Ceres CDNA ID no. 23387900 at SEQ ID NO. 115 with e-value of 2.90E-61 and percent identity of 98.3
MASKALILLGLFSVLLVVSEVSAARQSGMVKPESEETVQPEGYGGGHGGHGGHGGGGGHGHGGHNGGGGHGLDGYGGGGGHYGGGGGHYGGGGGHYGGGGGHYGGGGGGHGGGGHYGGGGHGLNEPVQTKPGV

SEQ ID NO: 117 - protein, 120 aa, Arabidopsis thaliana
  misc_feature (1)..(120): Ceres CLONE ID no. 118878
  misc_feature (1)..(120): Functional Homolog of  Ceres CDNA ID no. 23387900 at SEQ ID NO. 115 with e-value of 2.50E-55 and percent identity of 98.0
  misc_feature (26)..(26): Xaa is any aa, unknown, or other
  misc_feature (76)..(76): Xaa is any aa, unknown, or other
MASKALILLGLFSVLLVVSEVSAARXSGMVKPESEETVQPEGYGGGHGGHGGHGGGGGHGHGGHNGGGGHGLDGYXGGGGHYGGGGGHYGGGGGGYGGGGGHHGRAESTPLKPLSYQFLR

SEQ ID NO: 118 - protein, 120 aa, Arabidopsis thaliana
  misc_feature (1)..(120): Ceres CLONE ID no. 3929
  misc_feature (1)..(120): Functional Homolog of  Ceres CDNA ID no. 23387900 at SEQ ID NO. 115 with e-value of 4.00E-64 and percent identity of 97.5
MASKALILLGLFSVLLVVSEVSAARXSGMVKPESEETVQPEGYGGGHGGHGGHGGGGGHGHGGHNGGGGHGLDGYGGGGGHYGGGGGHYGGGGGHYGGGGGHYGGGGHGLNEPVQTKPGV

SEQ ID NO: 119 - protein, 127 aa, Arabidopsis thaliana
  misc_feature (1)..(127): Ceres CLONE ID no. 12459
  misc_feature (1)..(127): Functional Homolog of  Ceres CDNA ID no. 23387900 at SEQ ID NO. 115 with e-value of 7.99E-59 and percent identity of 95.0
MASKALILLGLFAILLVVSEVSAARQSGMVKPESEETVQPEGYHGGHGGHGGGGHYGGGGHGHGGHNGGGGHGLDGYGGGHGGHYGGGGGHYGGGGGHGGGGHYGGGGHHGGGGHGLNEPVQTKPGV

SEQ ID NO: 120 - protein, 127 aa, Arabidopsis thaliana
  misc_feature (1)..(127): Ceres CLONE ID no. 1354021
  misc_feature (1)..(127): Functional Homolog of  Ceres CDNA ID no. 23387900 at SEQ ID NO. 115 with e-value of 3.50E-58 and percent identity of 94.1
MASKALILLGLFAILLVVSEVSAARQSGMVKPESEATVQPEGYHGGHGGHGGGGHYGGGGHGHGGHNGGGGHGLDGYGGGHGGHYGGGGGHYGGGGGHGGGGHYGGGGHHGGGGHGLNEPVQTKPGV

SEQ ID NO: 121 - protein, 127 aa, Arabidopsis thaliana; identical to SEQ ID NO: 120
  misc_feature (1)..(127): Public GI no. 30017217
  misc_feature (1)..(127): Functional Homolog of  Ceres CDNA ID no. 23387900 at SEQ ID NO. 115 with e-value of 3.50E-58 and percent identity of 94.1

SEQ ID NO: 122 - protein, 160 aa, Arabidopsis thaliana
  misc_feature (1)..(160): Ceres CLONE ID no. 109026
  misc_feature (1)..(160): Functional Homolog of  Ceres CDNA ID no. 23387900 at SEQ ID NO. 115 with e-value of 1.80E-54 and percent identity of 91.4
  misc_feature (87)..(87): Xaa is any aa, unknown, or other
  misc_feature (94)..(94): Xaa is any aa, unknown, or other
MASKALILLGLFAILLVVSEVSAARXXGMVKPESEETVQPEGYHGGHGGHGXGGHYGGGGHGHGGHNGGGGHGLDGYGGGHGGHYGXGGGHYGXGGGHGGGGHYGGGGHHGGGGHGLNEPVQTKGEEQEAGKKGFHSDTQRLLNLSLETNLTLVAMTLAM

SEQ ID NO: 123 - DNA, 869 bp, Glycine max
  misc_feature (1)..(869): Ceres CDNA ID no. 23401690
  misc_feature (1)..(869): Also Known As Ceres GEMINI ID 531F11
  misc_feature (1)..(869): Also Known As Ceres CLONE ID 603410
acagttcaaggctcattaagttgtttcacagccagcacgcaaacttcagctcaacaccctcgttccctttcggctccaaaacatgtcatccacaaccacggattctgattgttcatatttggaacaaattcaacaatatctccttcacaatgattcaacaattctaacaccacctcaagcttttccaagccctagccatgatagtagttcggatgcaagtgtccactttgagcacccttcggaagcgcatgacgtgaacgcgccacccaaatggaggcgctaccggggtgtgaggcgtaggccatgggggaagttcgcagcagagataagagatccaaagaaaaatggttctagggtttggctcggaacttatgttaacgaggaggaagcagctttggcttacgacaaagctgctttcaacatgcgtggccaaaaggctaagctgaattttcctcacctcattggctctgctgtgcagccggaaccaccgtgtctggcggtttctaagaggagcttaccagagtcttctcccccaacatcaccatatgatagttgtgagtcaaaagggtctaagaggaggaagagcctagttgatttgctcaataacttagccaagaacaaaagccaagccaaggtggtagaaatggccttggaggcaaatgaggttgagcaatgggtgaatgaattgaatgattgcactctattctggtgctcctagtgttgttgtgttttttctttttttaatttttgtttgtgtagttccaagttctttgtttttttgctgtgccaacaatgcagttcctaaataagtttgtaataatgatttttgcccaccacggaagaaattcaagtgctgattttaatttgtt

SEQ ID NO: 124 - protein, 211 aa, Glycine max
  misc_feature (1)..(211): Ceres CDNA ID no. 23401690
  misc_feature (1)..(211): Also Known As Ceres GEMINI ID 531F11
  misc_feature (1)..(211): Also Known As Ceres CLONE ID 603410
  misc_feature (65)..(129): Pfam Name: AP2; Pfam Description: AP2 domain
MSSTTTDSDCSYLEQIQQYLLHNDSTILTPPQAFPSPSHDSSSDASVHFEHPSEAHDVNAPPKWRRYRGVRRRPWGKFAAEIRDPKKNGSRVWLGTYVNEEEAALAYDKAAFNMRGQKAKLNFPHLIGSAVQPEPPCLAVSKRSLPESSPPTSPYDSCESKGSKRRKSLVDLLNNLAKNKSQAKVVEMALEANEVEQWVNELNDCTLFWCS

SEQ ID NO: 125 - protein, 202 aa, Glycine max
  misc_feature (1)..(202): Ceres CLONE ID no. 605218
  misc_feature (1)..(202): Functional Homolog of  Ceres CDNA ID no. 23401690 at SEQ ID NO. 124 with e-value of 5.69E-49 and percent identity of 65.5
MVSATVDSDFAFLESVQQYLLGHDSINLMSETHQAASHDPFSDPNKCDGDSGNIAFRSEDATAVVARDHAPPTWKHYRGVRRRPWGKFAAEIRDPKKNGARVWLGTYDTEEKAALAYDKAAFKMRGQKAKLNFPHLIDSDNSDELSEPVMMTTSKRSLLEISSPSSSCSDDSSESQGTKRRKSLAELLNKLAKNRSQVKVEC

SEQ ID NO: 126 - protein, 233 aa, Nicotiana tabacum
  misc_feature (1)..(233): Public GI no. 57012759
  misc_feature (1)..(233): Functional Homolog of  Ceres CDNA ID no. 23401690 at SEQ ID NO. 124 with e-value of 1.79E-29 and percent identity of 64.3
MYQPISTELPPTSFSSLMPCLTDTWGDLPLKVDDSEDMVIYGLLSDALTAGWTPFNLTSTEIKAEPREEIEPATIPVPSVAPPAETTTAQAVVPKGRHYRGVRQRPWGKFAAEIRDPAKNGARVWLGTYETAEEAALAYDKAAYRMRGSKALLNFPHRIGLNEPEPVRLTAKRRSPEPASSSISSALENGSPKRRRKAVAAKKAELEVQSRSNAMQVGCQMEQFPVGEQLLVS

SEQ ID NO: 127 - protein, 226 aa, Arabidopsis thaliana
  misc_feature (1)..(226): Ceres CLONE ID no. 6397
  misc_feature (1)..(226): Functional Homolog of  Ceres CDNA ID no. 23401690 at SEQ ID NO. 124 with e-value of 2.40E-27 and percent identity of 63.9
MSSSDSVNNGVNSRMYFRNPSFSNVILNDNWSDLPLSVDDSQDMAIYNTLRDAVSSAWTPSVPPVTSPAEEDKPPATKASGSHAPRQKGMQYRGVRRRPWGKFAAEIRDPKKNGARVWLGTYETPEDAAVAYDRAAFQLRGSKAKLNFPHLIGSCKYEPVRIRPRRRSPEPSVSDQLTSEQKRESHVDDGKSSLVVPELDFTVDQFYFDGSLLMDQSECSYSDNRI

SEQ ID NO: 128 - protein, 277 aa, Zea mays
  misc_feature (1)..(277): Ceres CLONE ID no. 282666
  misc_feature (1)..(277): Functional Homolog of  Ceres CDNA ID no. 23401690 at SEQ ID NO. 124 with e-value of 1.90E-25 and percent identity of 62.2
MLLNPASETSVLDTIRQHLLEEPAAAEARPADESFGSLVADQWSGSLPFRTDDADDMVVFGVLQDAFAYGWLPDGSFVHVKPEPVRSPDSSSYHPCSYDGSPCFGLLDPEPPLTPGTTTPGRGQEEAAAAMARGKHYRGVRQRPWGKFAAEIRDPARNGARVWLGTYDTAEDAALAYDRAAYRMRGSRALLNFPLRIGSGDKRPSPAPPEPTTSSDSSSSSASGSHKRRKRGEAAAANMAMALVPSPSQLNRPAQPWFPAAPVEQAAMAPRVEQIVV

SEQ ID NO: 129 - protein, 282 aa, Mesembryanthemum crystallinum
  misc_feature (1)..(282): Public GI no. 32401273
  misc_feature (1)..(282): Functional Homolog of  Ceres CDNA ID no. 23401690 at SEQ ID NO. 124 with e-value of 1.79E-30 and percent identity of 59.5
MSLIANFESDFAVLESIRRHLLEDWDPRAGAPAITTGSGPVYHRNSSFSSLYPCLTDNWGELPLKEDDSEDMVLFGVLRDAVHTGWSPQSGSESGSGSPAPVTVKPEPVDSPVSSPAPVRVAGGEAPVAAAPARGKHYRGVRRRPWGKFAAEIRDPAKNGARVWLGTFETAEDAALAYDRAAFRMRGSKALLNFPLRVNSGEPDPVRITSKRSSPERSVSSSSSESASPKRRKKEEVVVGPVAGQARPGLQQVGNVVEGMQVGVGCQVGVGTMPLGDQLLVT

SEQ ID NO: 130 - protein, 223 aa, Glycine max
  misc_feature (1)..(223): Ceres CLONE ID no. 592713
  misc_feature (1)..(223): Functional Homolog of  Ceres CDNA ID no. 23401690 at SEQ ID NO. 124 with e-value of 4.80E-45 and percent identity of 55.6
MATTISCDFSSVESIQHYLLELEHDFNTLMNASNHEICYSPTYNSFPSSTTFRLEGVHDAEGSLACKREHPKVEREFHAPPAWKRYRGVRRRPWGKFAAEIRDPKKNGARIWLGTYETEEEAGLAYDRAAFKMRGSKAKLNFPHLIGSHAPLKPIRVLTKTLKQNLLESDLSYSSAPQTQESKKRKNLTDLLNRLAKNRKQVEVFEMSLHASNDVNVDQWWSN

SEQ ID NO: 131 - protein, 234 aa, Lycopersicon esculentum
  misc_feature (1)..(234): Public GI no. 3342211
  misc_feature (1)..(234): Functional Homolog of  Ceres CDNA ID no. 23401690 at SEQ ID NO. 124 with e-value of 6.09E-29 and percent identity of 53.5
MDQQLPPTNFPVDFPVYRRNSSFSRLIPCLTEKWGDLPLKVDDSEDMVIYGLLKDALSVGWSPFNFTAGEVKSEPREEIESSPEFSPSPAETTAAPAAETPKGRHYRGVRQRPWGKFAAEIRDPAKNGARVWLGTYETAEEAAIAYDKAAYRMRGSKAHLNFPHRIGLNEPEPVRVTAKRRASPEPASSSGNGSMKRRRKAVQKCDGEMASRSSVMQVGCQIEQLTGVHQLLVI

SEQ ID NO: 132 - protein, 237 aa, Nicotiana sylvestris
  misc_feature (1)..(237): Public GI no. 57012876
  misc_feature (1)..(237): Functional Homolog of  Ceres CDNA ID no. 23401690 at SEQ ID NO. 124 with e-value of 8.70E-30 and percent identity of 52.8
MYQPISTEFPVYHRTSSFSSLMPCLTDTWGDLPLKVDDSEDMVIYGLLSDALTTGWTPFNLTSTEIKAEPREEIEPATSPVPSVAPPAETTTAQAVVPKGRHYRGVRQRPWGKFAAEIRDPAKNGARVWLGTYETAEEAALAYDKAAYRMRGSKALLNFPHRIGLNEPEPVRLTVKRRSPEPASSSISPASENSLPKRRRKAVAAKQAELEVQSRSNVMQVGCQMEQFPVGEQLLVS

SEQ ID NO: 133 - protein, 289 aa, Triticum aestivum
  misc_feature (1)..(289): Ceres CLONE ID no. 555364
  misc_feature (1)..(289): Functional Homolog of  Ceres CDNA ID no. 23401690 at SEQ ID NO. 124 with e-value of 5.69E-26 and percent identity of 52.2
MLLNPASEALVLDSIRQHLMEDTAAPAPEARRQRPAYCRSASFGSLVADQWSESLPFRADDSDDMVVYGALRDAFSCGWLPDGSFAAVKPEPLLPSPDSCYVGFLEPETPPATSPGESEEEAAAAFMGEAAAAAARGKHYRGVRQRPWGKFAAEIRDPAKNGARVWLGTYDTAEDAAVAYDRAAYRMRGSRALLNFPLRIGSEIAAAHAAAAAAGDKRPSPEPATSDSSSSSSSSGSPKRRKRGEAAAASMAMALVPPPSQLSRPAQAWYPAAPVEQVAMAPRAQQLVS

SEQ ID NO: 134 - protein, 166 aa, Brassica napus
  misc_feature (1)..(166): Ceres CLONE ID no. 944101
  misc_feature (1)..(166): Functional Homolog of  Ceres CDNA ID no. 23401690 at SEQ ID NO. 124 with e-value of 1.49E-25 and percent identity of 52.2
  misc_feature (158)..(158): Xaa is any aa, unknown, or other
  misc_feature (162)..(162): Xaa is any aa, unknown, or other
MQQDLTSYDCSSVLDSIRRHLLEDDSESLSSFSSSSSPDLESTRRRGGNFKGVRRRPWGKYAAEIRDPNKHGARIWLGTYETAEEAAAAYDRAAFKLRGAKAKLNFPHLIGIDGPEPSRITKRRLSTPVSCSPVARRRNTDIINLTARVPCLAFHYFXNIDXTTWC

SEQ ID NO: 135 - protein, 290 aa, Triticum aestivum
  misc_feature (1)..(290): Ceres CLONE ID no. 569593
  misc_feature (1)..(290): Functional Homolog of  Ceres CDNA ID no. 23401690 at SEQ ID NO. 124 with e-value of 1.19E-25 and percent identity of 51.1
MLLNPASEAMVLDSIRQHLMEDTAAPAPEARRQRPAYCRSASFGSLVADQWSESLPFRADDSDDMVVYGALRDAFSCGWLPDGSFAAVKPEPLLPSPDSCYVGFLEPETPPATSPGGSEEEAAAAFMGEEAAAAVARGKHYRGVRQRPWGKFAAEIRDPAKNGARVWLGTYDTAEDAAVAYDRAAYRMRGSRALLNFPLRIGSEIAAAHAAAAAAGDKRPSPEPATSDSSSSSSSSGSPKRRKRGEAAAASMAMALVPPSSQLSRPAHAWYPAVPAEQVAMAPCVQQLVS

SEQ ID NO: 136 - protein, 318 aa, Oryza sativa subsp. japonica
  misc_feature (1)..(318): Public GI no. 50927517
  misc_feature (1)..(318): Functional Homolog of  Ceres CDNA ID no. 23401690 at SEQ ID NO. 124 with e-value of 1.90E-25 and percent identity of 47.3
MTARSMLRNHPEASVLDTIRQHLLEEPRGGGGGEAAEASFGSLVADMWSDSLPFRDDDADDMVVFGAMRDAFSCGWLPDGVFAEVKPEPLLSPDSSSYDGSSCCFGFADVSEPVTPSDAASGAAEAAAAAAAATAEHGKEEEAAAAVARGKHYRGVRQRPWGKFAAEIRDPAKNGARVWLGTFDTAEDAALAYDRAAYRMRGSRALLNFPLRIGSEIAAAAAAAAAAAAGDKRPSPEPATSESSFSSSSSCTTTTTSSSTSSSGSPKRRKRGEAAAASMSMPLVPPPSQLNWPVQAWYPAAAPVEQVAITPRVEQLVI

SEQ ID NO: 137 - DNA, 860 bp, Arabidopsis thaliana
  misc_feature (1)..(860): Ceres CDNA ID no. 23416527
  misc_feature (1)..(860): Also Known As Ceres GEMINI ID 531A3
  misc_feature (1)..(860): Also Known As Ceres CLONE ID 1007869
agatatttgataaatcaatcaacaaaacaaaaaaaactctatagttagtttctctgaaaatgtacggacagtgcaatatagaatccgactacgctttgttggagtcgataacacgtcacttgctaggaggaggaggacatgttggtgtacggactcctcaaagatgccttccattttgacacgtcatcatcggacttgagctgtctttttgattttccggcggttaaagtcgagccaactgagaactttacggcgatggaggagaaaccaaagaaagcgataccggttacggagacggcagtgaaggcgaagcattacagaggagtgaggcagagaccgtgggggaaattcgcggcggagatacgtgatccggcgaagaatggagctagggtttggttagggacgtttgagacggcggaagatgcggctttagcttacgatatagctgcttttaggatgcgtggttcccgcgctttattgaattttccgttgagggttaattccggtgaacctgacccggttcggatcacgtctaaragatcttcttcgtcgtcgtcgtcgtcgtcctcttctacgtcgtcgtctgaaaacgggaagttgaaacgaaggagaaaagcagagaatctgacgtcggaggtggtgcaggtgaagtgtgaggttggtgatgagacacgtgttgatgagttattggtttcataagtttgatcttgtgtgttttgtagttgaatagttttgctataaatgttgaggcaccaagtaaaagtgttcccgtgatgtaaattagttactaaacagagccatatatcttcaatccataaacaaaatagacactttaataaagccgtgagtgttaattttcc

SEQ ID NO: 138 - protein, 186 aa, Arabidopsis thaliana
  misc_feature (1)..(186): Ceres CDNA ID no. 23416527
  misc_feature (1)..(186): Also Known As Ceres GEMINI ID 531A3
  misc_feature (1)..(186): Also Known As Ceres CLONE ID 1007869
  misc_feature (58)..(122): Pfam Name: AP2; Pfam Description: AP2 domain
MLVYGLLKDAFHFDTSSSDLSCLFDFPAVKVEPTENFTAMEEKPKKAIPVTETAVKAKHYRGVRQRPWGKFAAEIRDPAKNGARVWLGTFETAEDAALAYDIAAFRMRGSRALLNFPLRVNSGEPDPVRITSKRSSSSSSSSSSSTSSSENGKLKRRRKAENLTSEVVQVKCEVGDETRVDELLVS

SEQ ID NO: 139 - protein, 303 aa, Oryza sativa
  misc_feature (1)..(303): Public GI no. 14140141
  misc_feature (1)..(303): Functional Homolog of  Ceres CDNA ID no. 23416527 at SEQ ID NO. 138 with e-value of 7.00E-36 and percent identity of 48.92
MLLNPASREVAALDSIRHHLLEEEEETPATAPAPTRRPVYCRSSSFGSLVADQWSESLPFRPNDAEDMVVYGALRDAFSSGWLPDGSFAAVKPESQDSYDGSSIGSFLASSSSEAGTPGEVTSTEATVTPGIREGEGEAVAVASRGKHYRGVRQRPWGKFAAEIRDPAKNGARVWLGTFDSAEEAAVAYDRAAYRMRGSRALLNFPLRIGSEIAAAAAAAAAGNKRPYPDPASSGSSSPSSSSSSSSSSSSGSPKRRKRGEAAPASMAMALVPPPPPPAQAPVQLALPAQPWFAAGPIQQLVS

SEQ ID NO: 140 - protein, 303 aa, Oryza sativa subsp. japonica
  misc_feature (1)..(303): Public GI no. 56567585
  misc_feature (1)..(303): Functional Homolog of  Ceres CDNA ID no. 23416527 at SEQ ID NO. 138 with e-value of 7.00E-36 and percent identity of 48.92
MLLNPASREVAALDSIRHHLLEEEEETPATAPAPTRRPVYCRSSSFGSLVADQWSESLPFRPNDAEDMVVYGALRDAFSSGWLPDGSFAAVKPESQDSYDGSSIGSFLASSSSEAGTPGEVTSTEATVTPGIREGEGEAVAVASRGKHYRGVRQRPWGKFAAEIRDPAKNGARVWLGTFDSAEEAAVAYDRAAYRMRGSRALLNFPLRIGSEIAAAAAAAAAGNKRPYPDPASSGSSSPSSSSSSSSSSSSGSPKRRKRGEAAAASMAMALVPPPPPPAQAPVQLALPAQPWFAAGPIQQLVS

SEQ ID NO: 141 - protein, 235 aa, Matricaria chamomilla
  misc_feature (1)..(235): Public GI no. 17385636
  misc_feature (1)..(235): Functional Homolog of  Ceres CDNA ID no. 23416527 at SEQ ID NO. 138 with e-value of 1.60E-36 and percent identity of 53.41
MIRNNAFDSDFALLESVRRHLLDDNAPPMSCRSNNFLFPHLSDSWGELPLQQNDSEDMLIAKFLNEALPLQQNDSEGIITPEMTSSSENIFFVKSEPETSSFQPKSLGSQKGKHYRGVRRRPWGKYAAEIRDPAKNGARVWLGTYETAEDAAVAYDMAAYRMRGSRALLNFPLRINSGEPEPVRITSKRKTTSPSEGLVVKKVKVELEMSTQAEFPLVYGCYYCVILGPFLVKCF

SEQ ID NO: 142 - protein, 318 aa, Oryza sativa subsp. japonica; identical to SEQ ID NO: 136
  misc_feature (1)..(318): Public GI no. 50927517
  misc_feature (1)..(318): Functional Homolog of  Ceres CDNA ID no. 23416527 at SEQ ID NO. 138 with e-value of 1.70E-35 and percent identity of 64.8

SEQ ID NO: 143 - protein, 282 aa, Mesembryanthemum crystallinum; identical to SEQ ID NO: 129
  misc_feature (1)..(282): Public GI no. 32401273
  misc_feature (1)..(282): Functional Homolog of  Ceres CDNA ID no. 23416527 at SEQ ID NO. 138 with e-value of 9.89E-44 and percent identity of 59.68

SEQ ID NO: 144 - protein, 234 aa, Lycopersicon esculentum; identical to SEQ ID NO: 131
  misc_feature (1)..(234): Public GI no. 3342211
  misc_feature (1)..(234): Functional Homolog of  Ceres CDNA ID no. 23416527 at SEQ ID NO. 138 with e-value of 4.90E-42 and percent identity of 55.87

SEQ ID NO: 145 - protein, 202 aa, Glycine max; identical to SEQ ID NO: 125
  misc_feature (1)..(202): Ceres CLONE ID no. 605218
  misc_feature (1)..(202): Functional Homolog of  Ceres CDNA ID no. 23416527 at SEQ ID NO. 138 with e-value of 6.79E-29 and percent identity of 44.94

SEQ ID NO: 146 - protein, 233 aa, Nicotiana tabacum; identical to SEQ ID NO: 126
  misc_feature (1)..(233): Public GI no. 57012759
  misc_feature (1)..(233): Functional Homolog of  Ceres CDNA ID no. 23416527 at SEQ ID NO. 138 with e-value of 2.79E-40 and percent identity of 58.5

SEQ ID NO: 147 - protein, 237 aa, Nicotiana sylvestris; identical to SEQ ID NO: 132
  misc_feature (1)..(237): Public GI no. 57012876
  misc_feature (1)..(237): Functional Homolog of  Ceres CDNA ID no. 23416527 at SEQ ID NO. 138 with e-value of 5.09E-40 and percent identity of 53.51

SEQ ID NO: 148 - protein, 277 aa, Zea mays
  misc_feature (1)..(277): Ceres CLONE ID no. 398626
  misc_feature (1)..(277): Functional Homolog of  Ceres CDNA ID no. 23416527 at SEQ ID NO. 138 with e-value of 1.09E-35 and percent identity of 51.91
MLLNPASMLDTIRQHLLEEPPAAADESFGILVADQWSDSLPFRTDDADDMVVFGALQDAFAYGWLPDGSFAHVKPEPVRSPDSSYYSYDGSCFGGLPYPEQPLTPGSEGEAAATPSPRREEAAAAVARGKHYRGVRQRPWGKFAAEIRDPAKNGARVWLGTYDTAEDAALAYDRAAYRMRGSRALLNFPLRIASEIAAAAAGDKRPLALPEPATSSDSSSTGGSPKRRKRGEAAAANMAMALVPPPSQLSRPAQPWFPAAAPVEQAAMPPRVEQLVI

SEQ ID NO: 149 - protein, 290 aa, Triticum aestivum; identical to SEQ ID NO: 135
  misc_feature (1)..(290): Ceres CLONE ID no. 569593
  misc_feature (1)..(290): Functional Homolog of  Ceres CDNA ID no. 23416527 at SEQ ID NO. 138 with e-value of 8.10E-33 and percent identity of 47.85

SEQ ID NO: 150 - protein, 289 aa, Triticum aestivum; identical to SEQ ID NO: 133
  misc_feature (1)..(289): Ceres CLONE ID no. 555364
  misc_feature (1)..(289): Functional Homolog of  Ceres CDNA ID no. 23416527 at SEQ ID NO. 138 with e-value of 4.30E-34 and percent identity of 48.39

SEQ ID NO: 151 - DNA, 653 bp, Brassica napus
  misc_feature (1)..(653): Ceres CDNA ID no. 23419038
  misc_feature (1)..(653): Also Known As Ceres GEMINI ID 552G6
  misc_feature (1)..(653): Also Known As Ceres CLONE ID 969750
acaaacacacaacacaacaatggattacatcgacaacaccgtcgaaactcaatcaaagtacaaaggcatccgtcgccggaaatgggggaaatgggtatcggagattcgagttccgggaactcgcgaccgtctctggttaggctcattctccacggcggaaggcgcagccgtggcgcacgacgtggctttctactgtttacaccaaccaaactcgctcgaatctytcaacttccctcacttgcttcctccttccatagtttccaagacttcgccgaggtctatccagcaagctgcttctaatgccggaatggccgttgacgccggaatcgttaacagctgtgatcacgcgtccgggaactctgggaatggagatacaacgacggcgtattgtgagaatggaggtgcgttgaatatatcagtgtatgattatttggacggtcacgatcacgtttgaacttcatcttcttgttttttcgtttaaagatacagctactcaaaagaaacagtgatggagcctggtgtgtaagcaaacaaagcgttgtaaatataattatacgtttatgtttcgctgttggcccaattcaagaaacttttgttgtacgattatatatatttttattttgaatgccttcaagaggattataatgcgagtg

SEQ ID NO: 152 - protein, 144 aa, Brassica napus
  misc_feature (1)..(144): Ceres CDNA ID no. 23419038
  misc_feature (1)..(144): Also Known As Ceres GEMINI ID 552G6
  misc_feature (1)..(144): Also Known As Ceres CLONE ID 969750
  misc_feature (12)..(77): Pfam Name: AP2; Pfam Description: AP2 domain
MDYIDNTVETQSKYKGIRRRKWGKWVSEIRVPGTRDRLWLGSFSTAEGAAVAHDVAFYCLHQPNSLESLNFPHLLPPSIVSKTSPRSIQQAASNAGMAVDAGIVNSCDHASGNSGNGDTTTAYCENGGALNISVYDYLDGHDHV

SEQ ID NO: 153 - protein, 198 aa, Glycine max
  misc_feature (1)..(198): Ceres CLONE ID no. 473902
  misc_feature (1)..(198): Functional Homolog of  Ceres CDNA ID no. 23419038 at SEQ ID NO. 152 with e-value of 2.80E-17 and percent identity of 59.5
MAKPSSEKPEEHSDSKYYKGVRKRKWGKWVSEIRLPNSRQRIWLGSYDTPEKAARAFDAAMFCLRGRNAKFNFPDNPPDIAGGTSMTPSQIQIAAAQFANAGPHEGHSGRPEHPPMESPSPSVSEGTIQTDSDVPTLNGSVTDLFTPVGSSGYASDYGIFPGFDDFSGDFYVPEMPNVNYGEENGEGFIVDESFLWNF

SEQ ID NO: 154 - protein, 179 aa, Zea mays
  misc_feature (1)..(179): Ceres CLONE ID no. 1469452
  misc_feature (1)..(179): Functional Homolog of  Ceres CDNA ID no. 23419038 at SEQ ID NO. 152 with e-value of 2.00E-23 and percent identity of 54.0
MRRAEPVGEQADAERRMSGYKGVRRRRWGKWVSEIRVPGSRERLWLGSYATPEAAAVAHDTAVYFLRGGGGGPGDVAALNFPERAAAAYGAGGRLSPRSVQRVASDAGMAADAQLVAAREDTRAHRTGIGGGASARPRDRDAGDACAGRAHNASLHSTGAGREQPVSGEISVDDMDILL

SEQ ID NO: 155 - protein, 216 aa, Thellungiella salsuginea; identical to SEQ ID NO: 109
  misc_feature (1)..(216): Public GI no. 41351817
  misc_feature (1)..(216): Functional Homolog of  Ceres CDNA ID no. 23419038 at SEQ ID NO. 152 with e-value of 3.40E-12 and percent identity of 44.6

SEQ ID NO: 156 - protein, 153 aa, Gossypium hirsutum
  misc_feature (1)..(153): Public GI no. 33324520
  misc_feature (1)..(153): Functional Homolog of  Ceres CDNA ID no. 23419038 at SEQ ID NO. 152 with e-value of 4.49E-17 and percent identity of 41.7
MELGDCCLTSSPASGEKRKLHRTQQKEKPFRGIRMRKWGKWVAEIREPNKRSRIWLGSYTTPVAAARAYDTAVFYLRGPSARLNFPDLIFQEDELRDISAASIRKKATEVGAKVDALQTSLHHASASSSESSNPTRVFRKPDLNKYPDSSDED

SEQ ID NO: 157 - DNA, 1222 bp, Arabidopsis thaliana
  misc_feature (1)..(1222): Ceres CDNA ID no. 23427553
  misc_feature (1)..(1222): Also Known As Ceres GEMINI ID 531H6
  misc_feature (1)..(1222): Also Known As Ceres CLONE ID 40501
ctttctctcttctctttctcggtttccccattttctatctagacaaagagtgttgtccgaattggctctgtctcaaaaaatgaaattctcaaattaaccacaacgatctttagagccttcttcgctcaccgatctctgaaaccctggtagtttctatgagtatgtcgcagtctcgagctgtccaaagatcgtcttcacctaatgaggatagaggtgagaatcagttagtggtttatgacttgaaaggaaatgatgatactgaagaagaagttctaccggttcaatctcagcctttgtcatctagaacacagtgtccctctatcggggcatttacggttcagtgtgcaagttgtttcaaatggagactcatgccttcaatgcagaagtatgaagagattagggaacagcttcttgaaaacccgtttttctgcgatacagcgcgtgagtggaagccggatatttcttgtgatgttcctgctgatatctatcaagatggaactcgtctttgggctattgataaaccgaatatctctcgtccacccgctggctggcaacgtttactgcggattagaggtgaaggaggtaccagatttgctgatgtttattatgttgctccgtctggaaagaagcttcgatcaactgtggaggtccaaaagtacttgaatgacaactccgaatacattggagaaggggtgaaactttcacagttctcgtttcaaatcccgaaaccgctgcaggatgactacgtgaggaagcgcccagctcgactactggattccatcgataatacaaacacccctgtagctaaagaagctaatccactggcatggatatctccagatgatcatatatcgttgcagctaggtacgccaaccgagtctggacttaacaattcacattaccaaccatcgaaaaagaaaaaaacatcgacgctatcaatctttggctccaacgacgaacttsctgatagataatctagctagacgagagtgaacttatctcgtcttctctggtatataacccgtcttctttcttcgttttttgggtttgtcttatcgaagaaactgaaagcatgtggttagcttgttttttgtgtataccatctattttgttttgcagtgtaacatactttctatgaagaagatgggtccttttggtttttgcttccaaataactggattttcatgctgaaagtttttaaacctaaagtttgattattacc

SEQ ID NO: 158 - protein, 272 aa, Arabidopsis thaliana
  misc_feature (1)..(272): Ceres CDNA ID no. 23427553
  misc_feature (1)..(272): Also Known As Ceres GEMINI ID 531H6
  misc_feature (1)..(272): Also Known As Ceres CLONE ID 40501
  misc_feature (118)..(195): Pfam Name: MBD; Pfam Description: Methyl-CpG binding domain
  misc_feature (58)..(111): Pfam Name: zf-CW; Pfam Description: CW-type Zinc Finger
MSMSQSRAVQRSSSPNEDRGENQLVVYDLKGNDDTEEEVLPVQSQPLSSRTQCPSIGAFTVQCASCFKWRLMPSMQKYEEIREQLLENPFFCDTAREWKPDISCDVPADIYQDGTRLWAIDKPNISRPPAGWQRLLRIRGEGGTRFADVYYVAPSGKKLRSTVEVQKYLNDNSEYIGEGVKLSQFSFQIPKPLQDDYVRKRPARLLDSIDNTNTPVAKEANPLAWISPDDHISLQLGTPTESGLNNSHYQPSKKKKTSTLSIFGSNDELADR

SEQ ID NO: 159 - protein, 258 aa, Brassica napus
  misc_feature (1)..(258): Ceres CLONE ID no. 956457
  misc_feature (1)..(258): Functional Homolog of  Ceres CDNA ID no. 23427553 at SEQ ID NO. 158 with e-value of 1.39E-84 and percent identity of 66.6
MSSQSCHGNESNSVNKEGNVDPSSVSENQLVLYDPKGNETEEEGAEPNQSQTSSHKTQCPSIGAFTVQCATCLKWRLMPSMEKYEEIREQILEKPFYCETACEWKANVTCDVAEDISQDGTRVWAIDRPSISRPPAGWQRQLRIRGEGGTKFADVYYVTPSGKKLRSNVEVQKYLNENPEYITQGVKLSQFSFQIPKPLRENYVRKRPARPMEPSDAPVAIEANPLALVSPDAQTPLQPTEPGLCTHLKKARRSEPSS

SEQ ID NO: 160 - protein, 309 aa, Glycine max
  misc_feature (1)..(309): Ceres CLONE ID no. 1172789
  misc_feature (1)..(309): Functional Homolog of  Ceres CDNA ID no. 23427553 at SEQ ID NO. 158 with e-value of 3.70E-70 and percent identity of 59.8
MHRGKFSLTPKNEVKDLTGSSLTSYKHSSLLDPIDVSSSSDDENDLPNDDVSNQLVLYDPVVNGNNAIELAPDPLQCEHPLLPRSKPSHSVPRVLPSVGAFTVQCASCFKWRLIPTKEKYEEIREHILEQPFVCQKAREWRPHVSCDDPEDISQDGSRVWAIDKPNIAQPPAGWERLLRIRAEGSSKFADIYYIAPSGKRLRSMVEIQKFLMEHPEYTRDGVTLSQFSFQIPRPLQENYVRKRPARLTSSYEVSEPVEHEQVSPLAWVDPEGHGRRLGLPAPPFMESHDIDPISISRPSKRQATHKGAL

SEQ ID NO: 161 - protein, 312 aa, Glycine max
  misc_feature (1)..(312): Ceres CLONE ID no. 480785
  misc_feature (1)..(312): Functional Homolog of  Ceres CDNA ID no. 23427553 at SEQ ID NO. 158 with e-value of 2.69E-67 and percent identity of 58.3
MYHGKFSLTPKNEVKDLTGSSFPSYKHNSQLDPIDVSSSSDDENDLPNDDVSNQLVLYDPVANGNNAIELAPDPLQCEPPLLPRSKPSHSVPRALPSVGVFTVQCASCLKWRLIPTKEKYEEIREHIIEQPFVCQKAREWRPDVSCDDPEDISQDGSRVWAIDKPNIAQPPAGWERLLRIRAEGSSKFADIYYIAPSGKRLRSMVEVQKFLMEHPEYTRDGVTLSQFSFQIPRPLQENYVRKRSARLTSSYEVSEPVEHQQVSPLAWVDPEGCGGRLGLPPPPFMGSHDLDTTINMSISRPAKRQATHKGSL

SEQ ID NO: 162 - protein, 316 aa, Triticum aestivum
  misc_feature (1)..(316): Ceres CLONE ID no. 859154
  misc_feature (1)..(316): Functional Homolog of  Ceres CDNA ID no. 23427553 at SEQ ID NO. 158 with e-value of 1.10E-61 and percent identity of 57.2
MDSSKSPQPLKKSRTSLSGTDGHQFENDELQSETASDKTPGLKFETVDKAQDEFGEDSSPLQQSAASNVAYRGSPCIGAFTIQCARCFKWRLIPTKEKYEEIREHIIQEPFDCERAREWKPDVTCDDQEDISQDGSRLWAIDKPNIAQPPAGWERQIRIRGEGGTKFADVYYTSPTARKLRSLVEVDRYLQENPEYGAQGVTLAQFSFQIPRPLRQNYVKKRPKNASPSDEATTKPLQPVEVNPISWAAPLASEAKASGPASHADEKPVGSADVELVRKRKAEGSEPGEADANNHVSDAPETKLEDAQNGDATTTA

SEQ ID NO: 163 - protein, 297 aa, Zea mays
  misc_feature (1)..(297): Ceres CLONE ID no. 407007
  misc_feature (1)..(297): Functional Homolog of  Ceres CDNA ID no. 23427553 at SEQ ID NO. 158 with e-value of 8.39E-64 and percent identity of 55.6
MESSKSPQSSKNSRIVVPSDSNRSRFDNDGFSSETASNQMVVFNSEAADELGENRLQKSVITKGISPSIGAFTVQCAKCFKWRLIPTKEKYEEIRERIIQEPFVCKRAREWRPDITCNDPEDISQDGSRLWAIDKPNIAQPPHGWERQIRIRGEGGTKFADVYYTSPTGRKLRSLVEVDRFLQENPEHVAQGVTLAQFSFQIPRPLRQDYVKKKPKLINASDEASTITSKSSEPEEVNPIAWAVPTKHEGDASEEASFADETLASEVVLTRKRKIGSSLSVEPNHLSDELEPKLEDA

SEQ ID NO: 164 - protein, 297 aa, Zea mays; identical to SEQ ID NO: 163
  misc_feature (1)..(297): Public GI no. 13936312
  misc_feature (1)..(297): Functional Homolog of  Ceres CDNA ID no. 23427553 at SEQ ID NO. 158 with e-value of 8.39E-64 and percent identity of 55.6

SEQ ID NO: 165 - protein, 301 aa, Zea mays
  misc_feature (1)..(301): Ceres CLONE ID no. 283597
  misc_feature (1)..(301): Functional Homolog of  Ceres CDNA ID no. 23427553 at SEQ ID NO. 158 with e-value of 4.59E-63 and percent identity of 50.1
METSKSPQSSKNSHIVVPSDSNGPRFDNDGFSSEAASNQMVVFNSEAGDKEQDELGENRLQKSIITRGISPSIGAFTVQCAKCFKWRLIPTKEKYEEIRERIIEEPFVCKRAREWRPDVTCNDPEDISQDGSRLWAIDKPNIAQPPRGWERQIRIRGEGGTKFADVYYTSPTGRKLRSLVEVDRFLQENPEYGAQGVTLAQFSFQIPRPLRQDYVKKKPKLINPSDEASMIASKSFQPEEVKPIAWAVATKHEGDASEEASLTDEAPTSEVMLARKRKAGSSLSIEPNHLSDELEPKLEDA

SEQ ID NO: 166 - protein, 301 aa, Zea mays; identical to SEQ ID NO: 165
  misc_feature (1)..(301): Ceres CLONE ID no. 443626
  misc_feature (1)..(301): Functional Homolog of  Ceres CDNA ID no. 23427553 at SEQ ID NO. 158 with e-value of 4.59E-63 and percent identity of 50.1

SEQ ID NO: 167 - protein, 301 aa, Zea mays; identical to SEQ ID NO: 165
  misc_feature (1)..(301): Public GI no. 13936314
  misc_feature (1)..(301): Functional Homolog of  Ceres CDNA ID no. 23427553 at SEQ ID NO. 158 with e-value of 4.59E-63 and percent identity of 50.1

SEQ ID NO: 168 - DNA, 870 bp, Arabidopsis thaliana
  misc_feature (1)..(870): Ceres CDNA ID no. 23472397
  misc_feature (1)..(870): Also Known As Ceres GEMINI ID 531B1
  misc_feature (1)..(870): Also Known As Ceres CLONE ID 251343
gacatacccagttggaaaaattcaatcttttatccctaagattcgatctttcttcttgggaagttgataaatgttcaaggaaacataaaaaagagaagatttttgaataaaggttgaagaaaaatgcaggatccagcagcatattaccagacgatgatggcgaagcaacaacaacaacaacaaccacagtttgcagagcaagaacagttaaagtgtcctcgttgtgactcaccaaacactaaattctgttactacaacaactacaatctctcacagcctcgtcacttttgcaaaagctgtcgtcgttactggactaaaggcggcgctctccgtaacgttcccgtcggtggtggttctcgtaagaacgcaaccaaacgatccacttcttcttcttcttctgcttcctctccttccaacagtagccaaaacaagaagacgaaaaacccggatccggatcctgatccacgtaattctcaaaaaccggatttggatccgacccggatgctttacgggtttccgatcggtgaccaagacgtgaagggtatggagattggtggaagctttagctcgttgttggcgaataatatgcagcttggtctcggaggaggagggatcatgcttgacgggtcgggttgggatcatccgggtatgggtttgggtttgaggagaaccgaaccgggtaataataataataacccatggaccgatctggctatgaacagagcggagaaaaactgaagaagaaaagaagagaggggtattttggtaaattacagcaaactgattttgggtgacttgagccatcacgtagacactgaacagtttcgatcatgtttatgtcattttggtaatattattattattcctccc

SEQ ID NO: 169 - protein, 204 aa, Arabidopsis thaliana
  misc_feature (1)..(204): Ceres CDNA ID no. 23472397
  misc_feature (1)..(204): Also Known As Ceres GEMINI ID 531B1
  misc_feature (1)..(204): Also Known As Ceres CLONE ID 251343
  misc_feature (24)..(86): Pfam Name: zf-Dof; Pfam Description: Dof domain, zinc finger
MQDPAAYYQTMMAKQQQQQQPQFAEQEQLKCPRCDSPNTKFCYYNNYNLSQPRHFCKSCRRYWTKGGALRNVPVGGGSRKNATKRSTSSSSSASSPSNSSQNKKTKNPDPDPDPRNSQKPDLDPTRMLYGFPIGDQDVKGMEIGGSFSSLLANNMQLGLGGGGIMLDGSGWDHPGMGLGLRRTEPGNNNNNPWTDLAMNRAEKN

SEQ ID NO: 170 - protein, 211 aa, Glycine max
  misc_feature (1)..(211): Ceres CLONE ID no. 554743
  misc_feature (1)..(211): Functional Homolog of  Ceres CDNA ID no. 23472397 at SEQ ID NO. 169 with e-value of 4.10E-39 and percent identity of 72.4
MQDPTLFQPMKPHFPEQEQLKCPRCDSTNTKFCYYNNYNLSQPRHFCKNCRRYWTKGGALRNIPVGGGSRKNTKRSSSSNNNTKRASPSPPVSSAPAPEPDPTRIGPTPVVGGGSFSSLLASSGHLGLGNLLEGLNSSGSNLKTVQMEEFGENVSSGPVADPDSGRNPGLEMQSNGNAENFLSLQNGDSSCWNGTSGWSHLAIFTPGSSFQ

SEQ ID NO: 171 - protein, 211 aa, Glycine max; identical to SEQ ID NO: 170
  misc_feature (1)..(211): Ceres CLONE ID no. 1623097
  misc_feature (1)..(211): Functional Homolog of  Ceres CDNA ID no. 23472397 at SEQ ID NO. 169 with e-value of 4.10E-39 and percent identity of 72.4

SEQ ID NO: 172 - protein, 262 aa, Nicotiana tabacum
  misc_feature (1)..(262): Public GI no. 3341468
  misc_feature (1)..(262): Functional Homolog of  Ceres CDNA ID no. 23472397 at SEQ ID NO. 169 with e-value of 4.79E-29 and percent identity of 64.6
  misc_feature (218)..(218): Xaa is any aa, unknown, or other
MDTSHWPQGIGLVKAVEPSKPVPTERKPRPQKEQAINCPRCNSTNTKFCYYNNYSLSQPRYFCKTCRRYWTEGGSLRNVPVGGGSRKNKRSSSSSNNSSSSTSSSYKKIPDLTIPTSSQNPKIINEPHDLNLAFNPSATSNFSNISEFMALPLMNPNSTTSFMSSIMPQLSDSNNIMYSSSSTGLPNLHDLKPTLNFSLDGFDNNNGYGSLQGETAGXKLFFPLDDLKNVSTPNDDHEFDEQNRGQAAESHGFWNGMLGGGS

SEQ ID NO: 173 - protein, 212 aa, Glycine max
  misc_feature (1)..(212): Ceres CLONE ID no. 1120474
  misc_feature (1)..(212): Functional Homolog of  Ceres CDNA ID no. 23472397 at SEQ ID NO. 169 with e-value of 1.40E-38 and percent identity of 59.6
MQDPTLFQPMKPHFPEQEQLKCPRCDSTNTKFCYYNNYNLSQPRHFCKNCRRYWTKGGALRNIPVGGGSRKNTKRSSSSNNNTKHASPSPPVSSAPAPEIDPTRTDPNPVGGGGSFRSLLASSGHLGLGNLLEGLNSSGSNLKSVQMEEFGENVSSGTPVAVPGSGQNPGLEMQSNGNAESFLSLQNGDSGCCNGTNGWSNLAIFTPGSSYQ

SEQ ID NO: 174 - protein, 281 aa, Triticum aestivum
  misc_feature (1)..(281): Ceres CLONE ID no. 729860
  misc_feature (1)..(281): Functional Homolog of  Ceres CDNA ID no. 23472397 at SEQ ID NO. 169 with e-value of 3.69E-30 and percent identity of 58.8
MQEPGRRPFAGAVDLRRPKGYPAPLAAQAQAEAVAELATGEAHGDPCPRCESRDTKFCYYNNYNTSQPRHYCKSCRRYWTKGGTLRNVPVGGGSRKSSSSSSSSSSSPKRAKNSKRRRVAPAAPLEPEAEPGADAPAAVATTTKEAAATEDVTTAGDTAAAPAADGCFAFTAGEPDAPPAADRCFTFTSGEPDAPPAADGDGCFAFTAGEPDVPPAAKGDGGLAFTDHPSVALGLGVADDAGGKELADPSPFEWPSGCDLGSYWVAGVFADTDPALFLSPP

SEQ ID NO: 175 - protein, 234 aa, Pisum sativum
  misc_feature (1)..(234): Public GI no. 37051131
  misc_feature (1)..(234): Functional Homolog of  Ceres CDNA ID no. 23472397 at SEQ ID NO. 169 with e-value of 2.20E-33 and percent identity of 54.6
MPSSDSGESRRSIKPQNRPGAPAPEQENLPCPRCDSTNTKFCYYNNYNYSQPRHLCKACRRYWTHGGTLRDIPVGGGTRKNAKRSRTHHVAVTSSSSSSAVTSAPEQNYPSMTPIQGGSFPYGGVDGEGKQNMSVCGSFTSLLNNNPQQNSGFLALGGFGLGLGHGLGDMGFGIGREWSFPGMMDGSNMGVPVVSSGIGNSWQLEGGETGFVGGGGDCFSWPGLAISTPGNGLK

SEQ ID NO: 176 - DNA, 2296 bp, Arabidopsis thaliana
  misc_feature (1)..(2296): Ceres CDNA ID no. 23522373
  misc_feature (1)..(2296): Also Known As Ceres GEMINI ID 5110H5
atgggtagcagtgagatggaaaaatcaggtaaagagaaagaacctaagactacaccgccttcgacttcttcatctgctcctgctactgttgtttcacaggtttgcttttggtgtaaatttggtctagcaaagtgttttttgttagtgtcatgctttgatgtttaatgttttgtgtttttaggaaccttcttctgctgtgagtgctggagtggctgttactcaagattggtctggcttccaggtctaatacgagattattctttgtttctttgttgcattttggtgttatggggttcatgtttttcttgttgaacaggcttattctcctatgccgcctcatggttatgtagcatcaagtcctcaacctcatccttatatgtggggcgttcaggtaaatcgaatttttttagatgattttaagcattctttggagcttcaggggattagttgacgagtcccaaaacttttactatagatatttgcatacttgggataaattcccttggtcacttgtgtagatttaatcgagattaatattttctaccatatatagtacgttaggttaatgaatgaatgtaacgacaacttaagacattgttatttcctttttgtagcatatgatgccgccttatggaacaccgcctcatccgtatgttacgatgtatcctccaggtggcatgtatgctcatccttcattacctccggtactgttacagtttggatgttcagttatgttactcaaaaaagtgaatgtttttgtagtttctgttaacatgttccgtgctgcaacaggggtcttatccatatagtccctatgcaatgccttctcctaatggaatggctgaagcttctgtgagttttctctgttatcactgtttttattagagtatgggtcagatgggatcttgcttgaagaatgttttggattcagggtaatactggaagtgttattgagggtgatggtaaaccatctgatgggaaggaaaaattgccaatcaaaagatcaaaaggaagcttgggaagtttgaatatgattataggaaagaacaatgaagctggaaaaaactcaggagcatcagctaatggagcttgttctaaaaggcatgtgacttcatatttgtatgaacatcatattggcatgaatacttatgattgctagctctagctatgataatgttattggataattttgttgaaattgtctgatttgttctcggtttaacagtgctgagagcggttctgatggatcaagtgacggaagtgatgcaaattcacaaaacgtaagtttctagcatttcattaaatcgttgcgttggatttcatatgaaaattaaggagcgtttatgaatatggtattgatttttgtaggactctggctctagacacaacgggaaggatggttagctaatatagctttttagttctcatctcttaacatgtaataatgacgtacatgttagaatctgcttattttgaggtttctctttcttgtttcgtaattcaaggtgaaacagcttcagagagtggtggttctgctcatggaccaccccgtaatggaagtaatctaccagtgaaccagaccgtcgctatcatgccagtgtcggctacaggtgttccaggcccaccaacaaatctaaatatcggaatggattattggagcggtcatgggaatgtttctggagcagttcctggagttgtagtagatggttcccaatcacagccatggttacaggtttctgtaagtatctcctaatcttacttctcctttacgtttatccaagcagcgtgtttgattgttttgtgaaatcaggatgagagagagattaagcgacagagacggaagcaatccaatagggaatctgctcgtagatccaggttgcgtaaacaggtaacataaacatgtttcttcaagctgatctagcatcatcatgcctatcaagtatgaatgatcaaaagcttttccttttctcttctgtgttcaggcggagtgtgatgagctagcacaacgagcagaggttttgaatggagagaactcaagtcttagagcagaaattaacaagcttaaaagccaatatgaagagcttcttgctgaaaatagctctctcaaggtaaaagattacaataaaatcttcttctacaacatccataatctgcttgaacataaattgaaagttgctgttttctctggtacccgttgttgcagaataagttctcgtcagccccgtcactggaaggtggagacttggacaagaacgagcaagaaccacagagaagtacacgtcaggatgttgcgtag

SEQ ID NO: 177 - protein, 387 aa, Arabidopsis thaliana
  misc_feature (1)..(387): Ceres CDNA ID no. 23522373
  misc_feature (1)..(387): Also Known As Ceres GEMINI ID 5110H5
  misc_feature (1)..(205): Pfam Name: MFMR; Pfam Description: G-box binding protein MFMR
  misc_feature (326)..(365): Pfam Name: bZIP_Maf; Pfam Description: bZIP Maf transcription factor
MGSSEMEKSGKEKEPKTTPPSTSSSAPATVVSQEPSSAVSAGVAVTQDWSGFQAYSPMPPHGYVASSPQPHPYMWGVQHMMPPYGTPPHPYVTMYPPGGMYAHPSLPPGSYPYSPYAMPSPNGMAEASGNTGSVIEGDGKPSDGKEKLPIKRSKGSLGSLNMIIGKNNEAGKNSGASANGACSKSAESGSDGSSDGSDANSQNDSGSRHNGKDGETASESGGSAHGPPRNGSNLPVNQTVAIMPVSATGVPGPPTNLNIGMDYWSGHGNVSGAVPGVVVDGSQSQPWLQDEREIKRQRRKQSNRESARRSRLRKQAECDELAQRAEVLNGENSSLRAEINKLKSQYEELLAENSSLKNKFSSAPSLEGGDLDKNEQEPQRSTRQDVA

SEQ ID NO: 178 - protein, 368 aa, Arabidopsis thaliana
  misc_feature (1)..(368): Public GI no. 3608135
  misc_feature (1)..(368): Functional Homolog of  Ceres CDNA ID no. 23522373 at SEQ ID NO. 177 with e-value of 3.80E-139 and percent identity of 81.3
MASNEMEKSSKEKEPKTPPPSSTAPPSSQEPSSAVSAGMATPDWSGFQAYSPMPPPHGYVASSPQPHPYMWGVQHMMPPYGTPPHPYVAMYPPGGMYAHPSMPPGSYPYSPYAMPSPNGMTEVSVSGTDGDAKQSEVKEKLPIKRSRGSLGSLNMITGKNNEPGKNSGASANGAYSKSGESASDGSSEGSDGNSQNSSLLFFHSAEAASENGGSANGPQNGSAGTPILPVSQTVPIMPMTAAGVPGPPTNLNIGMDYWGAPTSAGIPGMHGKVSTPVPGVVAPGSRDGGHSQPWLQDDRELKRQRRKQSNRESARRSRLRKQAECDELAQRAEVLNEENTNLRAEINKLKSQCEELTTENTSLKVKKK

SEQ ID NO: 179 - protein, 409 aa, Arabidopsis thaliana
  misc_feature (1)..(409): Ceres CLONE ID no. 1188156
  misc_feature (1)..(409): Functional Homolog of  Ceres CDNA ID no. 23522373 at SEQ ID NO. 177 with e-value of 9.39E-152 and percent identity of 80.3
MASNEMEKSSKEKEPKTPPPSSTAPPSSQEPSSAVSAGMATPDWSGFQAYSPMPPPHGYVASSPQPHPYMWGVQHMMPPYGTPPHPYVAMYPPGGMYAHPSMPPGSYPYSPYAMPSPNGMTEVSGNTTGGTDGDAKQSEVKEKLPIKRSRGSLGSLNMITGKNNEPGKNSGASANGAYSKSGESASDGSSEGSDGNSQNDSGSGLDGKDAEAASENGGSANGPQNGSAGTPILPVSQTVPIMPMTAAGVPGPPTNLNIGMDYWGAPTSAGIPGMHGKVSTPVPGVVAPGSRDGGHSQPWLQDDRELKRQRRKQSNRESARRSRLRKQAECDELAQRAEVLNEENTNLRAEINKLKSQCEELTTENTSLKDQLSLLPPLEGISMDNDHQEPDTNQTGAAERKVDSYKDST

SEQ ID NO: 180 - protein, 407 aa, Petroselinum crispum
  misc_feature (1)..(407): Public GI no. 3336903
  misc_feature (1)..(407): Functional Homolog of  Ceres CDNA ID no. 23522373 at SEQ ID NO. 177 with e-value of 9.70E-118 and percent identity of 69.5
MGSSEMEKSSKETKEPKTPTSQEQVSPVVAGPAGPVTPDWSGFQAYSPMPPHGYMASSPQAPHPYMWGVQHMMPPYGTPPHPYVMYPHGGIYAHPSMPPGSYPFSPFAMPSPNGVAAEASGNTPGSMEADGGKVSEGKEKLPIKRSKGSLGSLNMITGKTNEASKPSGAATNGGYSKSGESASEGSSEEGSDANSQNDSQIKSGSRQDSLEAGASHNGNAHGLQNGQYANNSMVNQPISVVPLSTAGPTAVLPGPATNLNIGMDYWGGATSSAIPAMRGQVSPPITGGTVSAGARDNVQSQLWLQDERELKRQKRKQSNRESARRSRLRKQAECDELAQRAEALKEENASLRAELSRFRTEYEKIVAQNEVLKEKIREVPGQEDQWPGRNDQHNGNGSRETGHTEPA

SEQ ID NO: 181 - protein, 414 aa, Glycine max
  misc_feature (1)..(414): Ceres CLONE ID no. 545441
  misc_feature (1)..(414): Functional Homolog of  Ceres CDNA ID no. 23522373 at SEQ ID NO. 177 with e-value of 3.80E-123 and percent identity of 68.6
MGSSEMDKTTKEKESKTPPPPTSQEQSSTTGTGTINPEWPGFQAYSPIPPHGFLASSPQAHPYMWGVQQFMPPYGTPPHPYVAMYPPGGIYAHPSMPPGSYPFNPFAMPSPNGIAEASGNTPGSMEADGKPSEVKEKLPIKRSKGSLGSLNMITGKNNEHGKTLGTSANGIHSKSGESASEGEGTSEGSDANSQNDSQLKSGGRQDSFEDEPSQNGSSAYTPQNGGLNIPHTVVNQTMSIIPISAGGAPGAVPGPTTNLNIGMDYWGTPGSSNIPGLGRKVPSTAVAGGMVTVGSRDSAQSQLWLQDERELKRQRRKQSNRESARRSRLRKQAECDELAQRAEALKEENASLRSEVNRIRSDYEQLLSENAALKERLGELPPNDDHHHRSGRNDQHVGNDTQQSGQTEAVQGGH

SEQ ID NO: 182 - protein, 394 aa, Catharanthus roseus
  misc_feature (1)..(394): Public GI no. 5381313
  misc_feature (1)..(394): Functional Homolog of  Ceres CDNA ID no. 23522373 at SEQ ID NO. 177 with e-value of 5.50E-124 and percent identity of 68.6
MGSSEIDKSSKEAKEAKEAKETPPSSQEQPAATSAGTPDWTGFQAYSPIPPHGFLASSPQAHPYMWGVQHLMPPYGTPPHPYVAMYPHGGIYAHPSIPPGSYPFSPFAMPSPNGIAEPSVNTPGNMEVDGKASEGKEKLPIKRSRGSLGSLNMITGKNNDAGKTSGASANGACSKSAESASEGSSEGSDANSQNESQMKSGNRQDSGETSQNGSGAHGSQNGGTNTPHSMVAMVPLSASGGVTGPATNLNIGMDYWGTAASPTVPVVRGKVPSTPVGGGMVPARDPVQAQLWIQDERELKRQRRKQSNRESARRSRLRKQAECDELAQRAEALKEENNSLRAEVSLIRSEYEQLLAQNAALKERLGEASGQDDPRSSRNEQQHSVQRETAARSQ

SEQ ID NO: 183 - protein, 420 aa, Petroselinum crispum
  misc_feature (1)..(420): Public GI no. 3336906
  misc_feature (1)..(420): Functional Homolog of  Ceres CDNA ID no. 23522373 at SEQ ID NO. 177 with e-value of 1.20E-119 and percent identity of 68.5
MGSSGMDKSPKDIKEAKEPKIPTSQEQPSPAAAAAAAAAAAAAAGPVTPDWSGFQAYSPMPPHGYMASSPQAPHPYMWGVQHMMPPYGTPPHPYVMYPHGGIYAHPSMPPGSYPFSPFAIPSPNGVAEAFGNTPGSTEADGKVSEGKEKLPIKRSKGSLGSLNMITGKNNEASKTLGAAANGGYSKSGDSASDGSSEEGSDANSQNDSQIKSGSRQDSLEGESQNGNAHGLQNGQNANHSMVNQQISIVPITAAGTAGAIPGPMTNLNIGMDYWGGVTSSAVPAMRGKVTSPPITGGIVTAGARDNVQSQLWLQDERELKRQRRKQSNRESARRSRLRKQAECDELAQRAEVLQEENASLRAELGRARSEYEKALAQNAILKEKVGDVAGQEDQWPGRNDQHTGDEGQETGHIEPGQSGH

SEQ ID NO: 184 - protein, 397 aa, Phaseolus vulgaris
  misc_feature (1)..(397): Public GI no. 13775109
  misc_feature (1)..(397): Functional Homolog of  Ceres CDNA ID no. 23522373 at SEQ ID NO. 177 with e-value of 5.80E-120 and percent identity of 66.8
MGSSEMDKTPKEKESKTPPPTSQEQSSTTATGTINPDWPGFQAYSPIPPHGFLASSPQAHPYMWGVQQFMPPYGTPPHPYVAMYPPGGIYAHPSMPPGSYPFSPFAMPSPNGIAEASGNTPGSMEADGKPPEVKEKLPIKRSKGSLGSLNMITGKNNEHGKTRGTSANGIHSKSGDSASEGEGTSEGSDANSQNDSQMKSGGRQDSFEDEPSQNGTSAYTSQNGGISTPATVVNQNVPIIPISAGGAPGAVPGPTTNLNIGMDYWGTPAPSNIPALGRKVPSTAVAGSRDSVQSQLWLQDEREIKRQRRKQSNRESARRSRLRKQAECDELAQRAEALKEENASLRSEVSRIRSDYEQLLSENTALKERLGELPANDQHVGNEAQQNGQTEGVQGGH

SEQ ID NO: 185 - protein, 390 aa, Oryza sativa subsp. japonica
  misc_feature (1)..(390): Public GI no. 435942
  misc_feature (1)..(390): Functional Homolog of  Ceres CDNA ID no. 23522373 at SEQ ID NO. 177 with e-value of 1.10E-104 and percent identity of 65.5
MGSSGADAPTKTSKASAPQEQQPPASSSTATPAVYPDWANFQGYPPIPPHGFFPSPVASSPQGHPYMWGAQPMIPPYGTPPPPYVMYPPGVYAHPSMPPGAHPFTPYAMASPNGNADPTGTTTTAAAAAAGETDGKSSEGKEKSPIKRSKGSLGSLNMITGKNSTEHGKTSGASANGAISQSGESGSESSSEGSEANSQNDSHHKESGQEQDGEVRSSQNGVSRSPSQAKLNQTMAIMPMTSSGPVPAPTTNLNIGMDYWANTASSTPAIHGKATPTAAPGSMVPGEQWVQDERELKRQRRKQSNRESARRSRLRKQAECEELAQRAEVLKQENTSLRDEVNRIRKEYDELLSKNSSLKEKLEDKQHKTDEAGVDNKLQHSGDDSQKKGN

SEQ ID NO: 186 - protein, 417 aa, Glycine max
  misc_feature (1)..(417): Ceres CLONE ID no. 523155
  misc_feature (1)..(417): Functional Homolog of  Ceres CDNA ID no. 23522373 at SEQ ID NO. 177 with e-value of 7.49E-111 and percent identity of 65.2
MGSSDMDKTPKEKESKTPPATSQEQSSTTAMPTTNPDWSNFQTYSPIPPHGFLASSPQAHPYMWGVQHYMPPYGTPPHPYVAMYPHGGIYAHPSIPPGSYPFSPFAMASPNGIADASGNAPGRIEVGGKPPEVKEKLPIKRSKGSASGGNLNMWITGKNNEPGKIPGESANGIHSKSGESASDGTSEGSDENSQNDSQLKSRERQDSFEDEPSQNGSSVHAPQNGVHNRPQTVVNQTMSILPISTTSAPGAVPGPTTNLNIGMDYWGTPTSSTIPALHGKVPSTAVAGGMIAAGSRDGVQSQVWLQDERELKRQRRKQSNRESARRSRLRKQAECDELAQRAEALKEENATLRSEVSQIRSEYEQLRSENAALKERLGDIPGVATPGKEDLRSGQNDQHVSNDTQQSGQTEVVQGVH

SEQ ID NO: 187 - protein, 417 aa, Phaseolus vulgaris
  misc_feature (1)..(417): Public GI no. 13775107
  misc_feature (1)..(417): Functional Homolog of  Ceres CDNA ID no. 23522373 at SEQ ID NO. 177 with e-value of 1.49E-112 and percent identity of 64.3
MGSSDMDKTPKEKESKTPPATSQEQSPPTTGMATINPDWSNFQAYSPMPPHGFLASSPQAHPYMWGVQHIMPPYGTPAHPYVAMYPHGGIYAHPSIPPGSYPFSPFAMASPNGIADTSGNNPGSIEVGAKPPEVKEKLPVKRSKGSASGGSLNMWITGKNNDLGKTTGESANGIHSKSGDSASDGTSEGSDENSQNDSQLKSGERQDSFEDEPSQNGSSAHAPQNGVHSRPQTVVNQTMPIPISTASAPGAVPGPTTNLNIGMDYWGTPTSSAIPALHGKVSSTAVAGGMITAGSRDGVQSQIWLQDERELKRQRRKQSNRESARRSRLRKQAECDELAQRADVLKEENATLRAEVSRIRSEFEQLRSENASLKERLGEIPGVATPGNEDVRSGQNDQHVSNDTQQSRQKEAVQGVH

SEQ ID NO: 188 - protein, 376 aa, Zea mays
  misc_feature (1)..(376): Ceres CLONE ID no. 287677
  misc_feature (1)..(376): Functional Homolog of  Ceres CDNA ID no. 23522373 at SEQ ID NO. 177 with e-value of 4.90E-84 and percent identity of 63.7
MGSSGADTPSKEQQPPATSGAAIPPVYPDWSSFQAYPPIPPHGFFPSPVASSPQGHPFMWGAQAMIPPYGTPPPYVMYPPGVYAHPSMPPGAHPFTPYAITSPNGNADATGTTAAAGNTDGKPSEGKDKSPTKRSKGSLGSLNMLTGKNPSEHGKSSGASGNGVTSQSGESGSDSSSEGSEGNSHNDSHHKESGQEHDGDVRSSRNGVSRLQSEGKLNQAMAILPIPSSGPATDPTTNLNIGMDYWANTASSAPAIHGKATSTTVPGAVVPAEQWTQDEHELKKQRRKQSNRESARRSRLRKQAECEELAQRADVLKQENASLRDEVNRIRKEYEELLSRNNSLKEKLEGKQHKTDEAGLNNKLQHSADDSQKKGN

SEQ ID NO: 189 - DNA, 3755 bp, Arabidopsis thaliana
  misc_feature (1)..(3755): Ceres CDNA ID no. 23655935
  misc_feature (1)..(3755): Also Known As Ceres GEMINI ID 5110C8
atgtccggcagtctaggtttaacgccggcatccttaaaggcatctggccggagctccgagaatgtcagtcttcttacccttcaaggtaaaatcaaacgtgacccagaaggttacgaaacagagctccaattgatttacaaacagttcaaaacctccgtcgatctcttccatgaactagcagctctcagtttctcctccactggtggcattggctctgacccttctgtttcgaaagacctcggcgaccgtgccatgtttctagctcacgttactcccttttacccgaagcaactcgcggcgtttccagctcaattaactggtttactccgtacttcgtgcttagctatgccctcggggcttcgaaaccatattgcacaagctctgatccttctaatgaatcgaaaggtttgtgcttttatctgaattgattggaaaaaactgtcatttcttactttgtgtttgtggtgtgtaaagtttgagactttaaaaaggattggttttgttctgagaatgttttctttgtggtgtgaatagagtcttgtcatcgaggatttgctggctttgtttctggatattcagactcttggtgacaaaaacctgcgaaatcttgcttttggtcacattgttcaaaccattcgtaagatgagtatcaccgatcccaagcacaaatcacttcagaagattgtaatctctatgttggaggtaacactttttttcatgggattgcgttatgacttataatgcgagttttagtagatgatagttaagcttggtgtgttttttgtttgtagcaagaagatgaagcaaaggctaagagagcacttgctactctctgtgcgctacacaagaaaaagatctggcttggtgataaaaatgaaagagttgcaattgcgatttgtgaagcctgctttcattcttcacctaggtatatccttattttcttctaactatggagtatgttgatatgatatgattttttgttggtcaaattactaacttcttttttcatatgttcaggattatgatttccgctcttcggtttcttcttgattatgagaacatagacgatgatgacgatagtgatgctgaaagcgatgatgacgaggagtcaaagaaaatagatcaggttgtgattaatcgacaggctgtttacaaggtaaaacaacatttcattcacatatatgaatacttttgtcattgagtacgaagaagacacttactacttgttgatgaaagtttccgcctttatacttatctatatcattttcatcatttcaaactagtatgaaattaggtgatgtttatatgatatcatggaacattaatctatagggaaactgttttgagttagttttgtataatatttttccctgtttgatgttaggcaaacaacaaaggtacatcctctagcaagaagaaaaagcaagcaaaacttcagcgtgcagtgaaaagtattaaaagaaagcagcgttcgtcgtctgagaacaccacttcaacattttcacctcttaatcatttaaatgatgcgcaggtttacttcttagctttgtgtagtgcagtcacaatggtatggaagtggctatgattgaatgtttgtttctgttacagaaattcgcagagaaattgttttcccgtcttcagaccatcaagggcagtggtgaacgtgttgaggtaaactatccgtttagattaaccatctattctaatagaaacatatgagctaactaactgttgattaggtttcccactatatgatctcagttgattattttttcccctgttgaatacatttgcagactaggttgatgatgattaaagttattgctcgcacaattggtcttcacaagttgcatttactaagtttctatccttttcttcaaaactatgctctggtatgatctgcttaccctctttattattcttctgctaactgaaatttgatcgaaatcagttattaaatgcagccgcatgtaaaggacattacacaaatacttgcagcagcagttcaatcttgccacgatggggtatagaaacatttccccgtttaaacttgatttttttttttctcattcttcaatccttctaaatatattgtattgagcaggttccttctgatgttgtggagccactgttcaagcaaattgtgaatcagtttgtacacgacaagtcacgtcctgaggtgcgatttcgagttttttcacatcaagggacataactagaaagctcattctatcatttaatattttcctttccaattcatttttttaaacaggctattgctgtcggactcaatgtggtgcgagaaatgtgcctgagggttcacgacgtaactagttcttgactcgctgtgttttggtctaataaaaaagtagtttatccagtatcaaatctgttttgtctgaatagtgttttttctcctgttcttcagttgatgacagaagagttactgcaagatcttgctctgtataaaaagtcccatgaaaaagccatctcagcagcagcacgttccctcatagcattgttcagagaggtagccgaagcatttgatttgttggtttgagcaaaataatcgatgtatgtggtttattgaaaattgcgttctgttatctcagatcaacccttcgcttctggttaaaaaagatcgtggccgtcctggagctaccgtcttcatacctaaacattatggagagtctaatgtcttcagcaatgttcctaatgttgaattattgcaagaaagtgataatgagagtggctctgatggtgatcaagacgatgatggcgtggagttgcctatcggcgatgatgttgagcaggagctgatacctggtgattgtggaagcgaggacaaagctgaagaagattccaatgatggtgatgatatgaataacactgaagacgatagtgatatagatacttcaataggtggtgatgaagatgaagaggtgaatgacagtgatgaagctgatacagattcggaaaatgaggaaatcgaaagcgaagaagaggatggagaagcttctgattcttctgtagaggatagtggaaacaaagagaaagctaagggcaagaagaggaagattgtagattttgatgcgaatcttctctctgctgatacaagcctccgagcactcaagagattcgcagaagcaaagaacgaaaagccttcttttgatgaaggtgatggcatactttcgaatgaggacttccgaaaaatcaaaacacttcaggtattagagccctttctcttttgtatgtcctcttcgttctgtttcgtaaataagtccaacgttactgatgttgtgtgtcgtatacaggcaaagaaggaagcaaaaattgcattggctcgaaaaggattcaaggttccgaattctgatcagctaagcaagaagcgggtcgatccagccaaacttgaagtaagctgttactatgagaagctccaatttagtcacaaaatgtttggcatactcagtactaagtgattttaactctacccacaggctcacataaggcataaactaacaaaggaacaaagactggaattagttaaagcgggtagggaggacagagggaaatacaaatccaaggctgccgtcaaacagaagaagactggaggatcaagcaataaacagaaggagcacaggaagaatatgcctcttgctgcaataagatcaaaggctggtaaatcaaaacgaattaagaagatgaagaatagcatcagcggaagccagtttagaggaaggaaagcttggaagtga

SEQ ID NO: 190 - protein, 804 aa, Arabidopsis thaliana
  misc_feature (1)..(804): Ceres CDNA ID no. 23655935
  misc_feature (1)..(804): Also Known As Ceres GEMINI ID 5110C8
  misc_feature (449)..(803): Pfam Name: SDA1; Pfam Description: SDA1
  misc_feature (86)..(138): Pfam Name: NUC130_3NT; Pfam Description: NUC130/3NT domain
MSGSLGLTPASLKASGRSSENVSLLTLQGKIKRDPEGYETELQLIYKQFKTSVDLFHELAALSFSSTGGIGSDPSVSKDLGDRAMFLAHVTPFYPKQLAAFPAQLTGLLRTSCLAMPSGLRNHIAQALILLMNRKSLVIEDLLALFLDIQTLGDKNLRNLAFGHIVQTIRKMSITDPKHKSLQKIVISMLEQEDEAKAKRALATLCALHKKKIWLGDKNERVAIAICEACFHSSPRIMISALRFLLDYENIDDDDDSDAESDDDEESKKIDQVVINRQAVYKANNKGTSSSKKKKQAKLQRAVKSIKRKQRSSSENTTSTFSPLNHLNDAQKFAEKLFSRLQTIKGSGERVETRLMMIKVIARTIGLHKLHLLSFYPFLQNYALPHVKDITQILAAAVQSCHDGVPSDVVEPLFKQIVNQFVHDKSRPEAIAVGLNVVREMCLRVHDLMTEELLQDLALYKKSHEKAISAAARSLIALFREINPSLLVKKDRGRPGATVFIPKHYGESNVFSNVPNVELLQESDNESGSDGDQDDDGVELPIGDDVEQELIPGDCGSEDKAEEDSNDGDDMNNTEDDSDIDTSIGGDEDEEVNDSDEADTDSENEEIESEEEDGEASDSSVEDSGNKEKAKGKKRKIVDFDANLLSADTSLRALKRFAEAKNEKPSFDEGDGILSNEDFRKIKTLQAKKEAKIALARKGFKVPNSDQLSKKRVDPAKLEAHIRHKLTKEQRLELVKAGREDRGKYKSKAAVKQKKTGGSSNKQKEHRKNMPLAAIRSKAGKSKRIKKMKNSISGSQFRGRKAWK

SEQ ID NO: 191 - protein, 771 aa, Oryza sativa subsp. japonica
  misc_feature (1)..(771): Public GI no. 50928937
  misc_feature (1)..(771): Functional Homolog of  Ceres CDNA ID no. 23655935 at SEQ ID NO. 190 with e-value of 0.0 and percent identity of 56.9
MPRQHAPAFTPEAASASATGGAGERQSLPALQAKMKRDPEGYEEELRQLRRHFESSVFLFRQQAALASTSSSGGGGEVAKELGDLALFLAHVAPFYPDDLADLPDQIGGLLDTNARALPSGLRVHLVQALILLVNRKIVDLEDTMELFMELQVIGDRAVKKLAFSHIVHSIRRMNQTHKNEARNRKLQNILFTFLQGEEESRAKRAFTILCDLHRRRVWFDDRTANAICNACFHGSSRIMIAAISFLLGYENVEQEDDSDASSSEDEAQNPQIILSKEDVYKANHKGTAATKKKKKAKLQRVIRSMKRQQRKSTEDTGSNYYSPLTYLKDPQGFAEKLFSRLQKCNERFEVRMMMLKVIARTIGLHHLVLLNFYPYLQRYVQVPPDAVEPLFKQIVNQFVHDRSRPELMNEDLLQDLVLYKKSHEKAVSIAARSLITLFREICPSLLVKKDRGRPADPKARPKAFGEATIASDVPGAELLDEDFSSEGEGSDDESDAFDSNDEKELQSARGTKQNLDGSSEANKLDTDEGMKEEDQLSGDEDDTEELDEDQDISDNDSEENDDELELDSDMDEENDVSESDDDEELSEKLDDSDEGSDQDDDSDQDDKSKNSSRKANKRKLSDYIGQLNAADASLRALKKLAGAKKAEASCDEAGKILSDEDFKRIKELKAKKEAKLALAQHGLGKGHDTKSVTFKMPSSDQLSLKRVDPSKLEAHIKRKLTKEERLEMVKAGREDRGKYQARTAVKQKKLLLFLLYLYASHCVLDRWLEQ

SEQ ID NO: 192 - DNA, 3855 bp, Arabidopsis thaliana
  misc_feature (1)..(3855): Ceres CDNA ID no. 24365511
  misc_feature (1)..(3855): Also Known As Ceres GEMINI ID 5110E8
atggaggatgctgatggacttagcttcgatttcgaaggcggtcttgattccggacctgttcagaacaccgcttccgtcccggttgctccgcctgaaaactcttcctccgccgctgttaacgtagcaccgacctacgatcattcttccgcgacggtggctggagctgggaggggtagaagtttccgtcaaactgtttgtagacactggcttcgaggtctgtgtatgaaaggtgacgcctgtgggtttctccatcagttcgataaagctcgtatgccgatctgccgttttttccggttatacggtgaatgtcgagagcaggattgtgtgtataaacataccaatgaagatatcaaagaatgcaatatgtatgttacataaattcggttttcagtttcatgttttgtcagtttagattgaacttgatgattgagtttgtgttgattctaagactggttagatttattacttatcttgtgattatattttgtaggtacaagctggggttttgtcccaatggtcctgattgtcggtacaggcatgcaaagcttcctggacctccaccaccagttgaggaagttcttcagaagatacaacaattgacaacatacaattatgggacaaataggctctatcaagcaaggaatgttgctccacagctacaagatagacctcaggggcaagttccaatgcaaggccagccacaagaatcaggtaacttgcagcagcaacaacaacaacaacctcagcaatcacaacaccaggtcagccagactctgataccaaatcctgctgatcaaacgaacagaacatctcatcctttgcctcaaggggtaaataggtgtgttcagagtcctaaggtttttaattgggttctgtaaattatgtttatcaattcaagacgttgttattggttcagtattaaaatattggtttcttataagagctttgaaacaatttagaatgtaactggttatttgcaagttcagaatgaactttatatatacagatatattttcaactttatctacctgattttaggataatttttctttgatagctagttaaatttctgagattttatttgacctcaactgttacaaaaacaataaatcgacctgcattgggctggctttaccctcttgttttgcttttgagtattattagtctccttttttccatcaggtacccttcccccttcagctaaaatgtgggaaataggctttgcaaatggtggtatacatatactggtttttgttgatatttttatcttatagatgatcatagtattttaagatttatgtcaaacagaagcataccgattattctctactgtttctgtaaggctagaatacatatagcaccattttgtcatttatttagtgctgtgctcaatggcctaattgccagtggttttcagcaggactcctgcgaccctaagagtcatgttttctttatttcagattggtcaccaagagttgattgcctattcttgtgctctagtgttgctattttgcctataacgtaattttattcagatattagtaagagattgtgtaattcatgtagctatatcttctaaaatcccatacaattgatctaaaatgagtgtgtgaagaagaatgggattcttcaaacgttgtctagtatttcggctttcgaagatgctcatcttgactgctcgatattaagtttgatgtaactcttgtatgtttgattttatggattcgttaactgtatatataccttgtggtatattattactcttcataggtaatcccttacataatttaggatcttgtttttttcaggtattttgtagttaaaagtaacaatcgagaaaattttgaattatctgtgcaacaaggtgtgtgggcaacacaaaggagcaatgaagctaaacttaatgaagctttcgactctgtggaaaatgtgatcttgatattttctgtcaaccggacccggcatttccaggtagtttattgggttaaaccttagttactgtaagcctattgacagatcaaaacccttattcatgtgtattgatggttgcctttctgtagttttcttctccatagtgtatttggtaggcagcgttatgattctaaataactttgtttcacatatgatgctataggggtgtgctaagatgacatcaagaattggtggttacattggtggaggaaactggaaacatgaacatggaactgcacagtatggccggaacttttcagttaaatggttaaaggtgtgtgactaagctttcccttttagttaatagtcctttctctgagatgtttatttagtcattctctatgcgattgagtctgttacatttagtccttctctggcacatgctactgagaagtaaaggggatgctttcataaatcatgcagtaacatgacttctttgattgattgtaattcttactattgtagttgtgcgaactatccttccacaaaactcggaatttgaggaatccttacaacgaaaacttacctgtgaaggtacgtggaatttctcaccatgtttttttttcactgctctagttggtctcctatctggaaatagtattgtttgttagatacaacacatgataaataaggatgtttatatcaatacactccgtaaaggtctaaattgtcccatgttgacctaactggctaactcgcacagttacacaaatgttttgctaggcattacaagttactactgatacatgattactattagctgatggtcgttgtgtaatgtttatgttttttttagtatttgcatgtaacctagtgacctttattttactcttttggttcaatgaccgtagataagcagagactgtcaggaattagagccctccgttggtgaacaactcgcttctttgctttatcttgaaccagatagcgagcttatggtatatactctctctcccactctctctcgttgttgtttaactttgttctttcatggttcttaagcgtataatttatgacacaatgaagaactgagctccatatgctcttttattggtgactttggtttcttctaggattttcattctgttacttcatcatggagtgttatttttgtttttccatgaatccaaggcaatctccatagctgcagaagcaaaacgagaagaagagaaagcaaagggtgtgaatccagagagtagagctgagaacccagacattgtgccgtttgaagacaatgaagaagaggaagaggaagaagatgaaagtgaggaggaagaagagagcatggcggggggtcctcaaggcagaggaagaggaagaggaataatgtggcctcctcaaatgcctttaggacgcggaatcagaccgatgcctggaatgggaggtttccctctcggagtaatgggccctggcgatgcatttccctatgggcctggtggatataatggtatgccagatccatttggcatgggtccaagaccctttggaccgtatggaccgaggttcggtggtgatttcagaggaccagtacctgggatgatgtttcctggtaggcctccgcaacagtttccacatggcggttatggtatgatgggaggcggacgaggcccgcatatgggaggaatgggaaacgctcctagaggagggaggccgatgtattatccaccagcaacatcatcagcacgacctggcccaagcaaccgaaaaacacctgagagaagcgatgagagaggagtgtcgggggatcaacaaaatcaggatgcatcacatgacatggagcagttcgaggttggaaacagtttaagaaacgaagagagtgaaagtgaagacgaagacgaagctccaagacgatcaagacatggagaaggaaagaagcgtcggtga

SEQ ID NO: 193 - protein, 678 aa, Arabidopsis thaliana
  misc_feature (1)..(678): Ceres CDNA ID no. 24365511
  misc_feature (1)..(678): Also Known As Ceres GEMINI ID 5110E8
  misc_feature (115)..(140): Pfam Name: zf-CCCH; Pfam Description: Zinc finger C-x8-C-x5-C-x3-H type (and similar)
  misc_feature (328)..(422): Pfam Name: YTH; Pfam Description: YT521-B-like family
MEDADGLSFDFEGGLDSGPVQNTASVPVAPPENSSSAAVNVAPTYDHSSATVAGAGRGRSFRQTVCRHWLRGLCMKGDACGFLHQFDKARMPICRFFRLYGECREQDCVYKHTNEDIKECNMYKLGFCPNGPDCRYRHAKLPGPPPPVEEVLQKIQQLTTYNYGTNRLYQARNVAPQLQDRPQGQVPMQGQPQESGNLQQQQQQQPQQSQHQVSQTLIPNPADQTNRTSHPLPQGVNSAVLNGLIASGFQQDSCDPKSHVFFISDWSPRVDCLFLCSSVAILPITYFVVKSNNRENFELSVQQGVWATQRSNEAKLNEAFDSVENVILIFSVNRTRHFQGCAKMTSRIGGYIGGGNWKHEHGTAQYGRNFSVKWLKLCELSFHKTRNLRNPYNENLPVKISRDCQELEPSVGEQLASLLYLEPDSELMAISIAAEAKREEEKAKGVNPESRAENPDIVPFEDNEEEEEEEDESEEEEESMAGGPQGRGRGRGIMWPPQMPLGRGIRPMPGMGGFPLGVMGPGDAFPYGPGGYNGMPDPFGMGPRPFGPYGPRFGGDFRGPVPGMMFPGRPPQQFPHGGYGMMGGGRGPHMGGMGNAPRGGRPMYYPPATSSARPGPSNRKTPERSDERGVSGDQQNQDASHDMEQFEVGNSLRNEESESEDEDEAPRRSRHGEGKKRR

SEQ ID NO: 194 - protein, 678 aa, Oryza sativa subsp. japonica
  misc_feature (1)..(678): Public GI no. 52076911
  misc_feature (1)..(678): Functional Homolog of  Ceres CDNA ID no. 24365511 at SEQ ID NO. 193 with e-value of 0.0 and percent identity of 62.5
MDDGDLSFDFEGGLDQPPAGGGGGPAPHSSDPGGVGGGGGGGGPGDGGGHGRGRGRGSYRQTVCRHWLRGLCMKGEACGFLHQFDKARMPVCRFFRDFGECREPDCAYKHSYDDVKECNMYKMGFCPNGPNCRYKHVKLPGPPPPVEEVLQKILQIRSFNKFNQHRHNNYNQQGERPQHPQGSGLPNQNSIDNTTTTTAQPAVGQQAQTTNQQPPQQQQQQQQQQQQQQKPNTNDQVQSVPNGSSNQATRIATPLPQGPSSSLIKSLVGNVKIRYFIVKSCNRENLEISVQQGIWATQRSNEAKLNEAFESIENVILIFSINRTRNFQGCAKMTSRIGGYIGGGNWKSAHGTAHYGRNFSIQWLKLCELSFQKTHHLRNPYNDNLPVKISRDCQELEPFIGEQLASLLYLEPDSELTAILIAAEAKKEEEKAKGVSADEAADNQDIVLFDDNEEEEEEESEEEEEGNGQESQGRGRGRGMMWPPQMPMLRGVGPMMGGRGFPPNMIGDGFGFGGGFGMPDPFGVPRGFPPFGPRFPGDFARGGPMPGMVFPGRPPQPGGMFPMGLEMMMGPGRGPLMGGLGMGGPGRPNRPVGMAPFMPPPPPPNNRGTKREQRRPGGERGDRYETTSDQGSRGHDATGNSGAEGARSQSGDRYGRSALRDDDSESDEEAAPRRSRKR

SEQ ID NO: 195 - DNA, 1888 bp, Arabidopsis thaliana
  misc_feature (1)..(1888): Ceres CDNA ID no. 23468313
  misc_feature (1)..(1888): Also Known As Zap1
cccaatttgagattgttcgatttcgatctacgagattcttacaagaacataagcagcttcggttttttgggattatcttatttggtcggatgatgatcttctcgatgtctgtgctaggctttgggaattagatatatttggggttaagctcgagtctctccggttttgagtttacttgagtttgttagtatttatggctgaggtgggaaaagttctggctagtgatatggagttagaccattcaaatgagactaaagcagtggatgatgttgttgccactactgataaagcggaggtcataccagtggctgtaactagaactgaaaccgttgttgaaagtttggaatctactgactgtaaggagcttgaaaaacttgttccacatacggtagcttcgcagtcggaagtagatgttgcttccccggtatccgagaaagcaccgaaggtttctgaaagtagcggtgcattatctttgcagtctggttcggaagggaatagtccttttattcgtgagaaggttatggaagacggatacaactggcggaaatatggacagaaacttgtgaaaggaaatgagtttgtaaggagctattacaggtgcactcaccctaactgcaaagcgaaaaaacagttggaacggtctgcgggtggacaagtcgtggataccgtttactttggggaacatgatcacccaaagcctcttgctggtgctgttcctatcaatcaggataagcgaagtgatgtcttcacagctgttagtaaagagaaaacatctggatccagtgttcagacacttcgtcaaaccgaaccaccaaagatccatggaggattacatgtttcagttattccaccagctgatgatgtgaaaactgatatttcacaatcaagtaggataacgggggacaacactcacaaggattataatagtcctaccgcaaagcgaaggaagaaaggagggaacattgagctgagtccagtggagaggtcaaccaatgattcacgcattgtggttcacactcagactctgtttgatattgtgaatgatgggtaccgatggcgtaaatatggtcagaaatcagtaaaaggcagcccatatccaaggagctactatagatgttcaagccctggatgccccgtcaagaaacacgtagagaggtcatctcatgacacaaagttgcttataacaacttacgagggaaaacacgaccacgatatgcctccaggaagagttgttactcataataacatgctggactcggaagttgatgataaagaaggagatgccaacaagactccacagagctcaactcttcaatccattacaaaagaccagcatgtcgaagatcacttaagaaagaaaacgaagactaatggctttgagaaaagtcttgatcaaggtccagttttggatgagaagctgaaggaggaaataaaagagagatcagatgcaaacaaagatcacgcagccaatcacgccaagccggaagcaaagtcagatgataaaaccactgtttgtcaagagaaggcagtaggaaccctggagagcgaggaacaaaaacccaagacagagcctgcccaaagctaagcattcagtgttgtaccgagtggtaatttatatggctgttttaacatagattagtacaggcgatatggttatagactgtacagttgttgttcaggcgggaccagatttagattagtgtttaatggaatagtatgctttaatacctttatgtaaccacttccatttggttcaaataagagttacaggaagagaaggtaacacaacaagagcccttctttgttgatggagcctgtgtaatagttgtagcatggggatgtatatgatttgattcaaccttattaatggttatgagacaaaactatc

SEQ ID NO: 196 - protein, 463 aa, Arabidopsis thaliana
  misc_feature (1)..(463): Ceres CDNA ID no. 23468313
  misc_feature (1)..(463): Also Known As Zap1
  misc_feature (110)..(168): Pfam Name: WRKY; Pfam Description: WRKY DNA -binding domain
MAEVGKVLASDMELDHSNETKAVDDVVATTDKAEVIPVAVTRTETVVESLESTDCKELEKLVPHTVASQSEVDVASPVSEKAPKVSESSGALSLQSGSEGNSPFIREKVMEDGYNWRKYGQKLVKGNEFVRSYYRCTHPNCKAKKQLERSAGGQVVDTVYFGEHDHPKPLAGAVPINQDKRSDVFTAVSKEKTSGSSVQTLRQTEPPKIHGGLHVSVIPPADDVKTDISQSSRITGDNTHKDYNSPTAKRRKKGGNIELSPVERSTNDSRIVVHTQTLFDIVNDGYRWRKYGQKSVKGSPYPRSYYRCSSPGCPVKKHVERSSHDTKLLITTYEGKHDHDMPPGRVVTHNNMLDSEVDDKEGDANKTPQSSTLQSITKDQHVEDHLRKKTKTNGFEKSLDQGPVLDEKLKEEIKERSDANKDHAANHAKPEAKSDDKTTVCQEKAVGTLESEEQKPKTEPAQS

SEQ ID NO: 197 - DNA, 1160 bp, Arabidopsis thaliana
  misc_feature (1)..(1160): Ceres CDNA ID no. 23462512
  misc_feature (1)..(1160): Also Known As Ceres GEMINI ID 533D3
  misc_feature (1)..(1160): Also Known As Ceres CLONE ID 114074
aaaaaagtgttgtttctgcagagctctctctctctctctctcgttctctttccacacattctttgatctccactatttaagtagacaagaatcataaagaaaatagtgagatgatgatgttagagtcaagaaacagtatgagagcttcaaactcagtcccagatctgtctcttcagatcagtcttcctaactatcacgccggaaaacctcttcacggcggtgaccggagctccacaagcagtgattctggaagcagcctcagtgacctgagccatgagaacaacttcttcaacaaacctctcttgagcttaggatttgaccatcatcatcaaaggcgctcaaacatgttccaacctcaaatctacggtcgagatttcaagagaagctcatcatcaatggttggtcttaaacgaagcattcgtgctccaagaatgagatggacttctactcttcatgctcacttcgtccatgctgttcaacttcttggcggccatgaaagagcaacgcctaaatcagtgttggagctcatgaatgtgaaggatctaaccctagctcatgtcaagagtcacttgcagatgtatagaacagtgaaatgcactgataaaggatcacaggagaaggaaaggtagagaaagaggcagagcagaggataggggacaataataataatgaagaagctgatgaaggaactgacacaaattcgccaaactcatcatctgtgcaaaagacccaaagagcttcatggtcatcgacaaaggaagtatctaggagcatatctacacaagcatattctcacttgggaacaactcatcacactaaggacaatgaagagaaagaggataccaacattcatctcaatttggatttcacattggggcggcctagttgggggatggaatatgcggaaccctccagtgatttaacccttctcaagtgctaattgccttaagctacaacaaataagtcagcttaggttaccagttttaacataattttaacttgttttgatcatatgagctttggaagaatcatattatcatcacatatgaacttctttccaagaatgttctatgagttttttgatatgtataatcaagagaatcgtttgaagtagtaagtattgttgtagtgggatgagaagggagtacaagttcaagtac

SEQ ID NO: 198 - protein, 174 aa, Arabidopsis thaliana
  misc_feature (1)..(174): Ceres CDNA ID no. 23462512
  misc_feature (1)..(174): Also Known As Ceres GEMINI ID 533D3
  misc_feature (1)..(174): Also Known As Ceres CLONE ID 114074
  misc_feature (107)..(158): Pfam Name: Myb_DNA-binding; Pfam Description: Myb-like DNA-binding domain
MMMLESRNSMRASNSVPDLSLQISLPNYHAGKPLHGGDRSSTSSDSGSSLSDLSHENNFFFNKPLLSLGFDHHHQRRSNMFQPQIYGRDFKRSSSSMVGLKRSIRAPRMRWTSTLHAHFVHHAVQLLGGHERATPKSVLELMNVKDLTLAHVKSHLQMYRTVKCTDKGSQEKER

SEQ ID NO: 199 - DNA, 1184 bp, Arabidopsis thaliana
  misc_feature (1)..(1184): Ceres CDNA ID no. 23377122
  misc_feature (1)..(1184): Also Known As Ceres GEMINI ID 555A3
  misc_feature (1)..(1184): Also Known As Ceres CLONE ID 1959
attttagatccaaaactcttctctgtctctctcaagatttatgttttcgtaactgtaactcatagcaaaaacgagtctaagatctgttcataatgatgatgttcaagagcggtgacatggattacacccagaaaatgaagagatgtcacgaatatgtagaagctctagaagaagaacaaaaaaagattcaagtctttcaacgtgagctccctttatgtttagaacttgtaacccaagctatcgagtcatgtcggaaggagttatcggaatcttcagaacatgttggcggccagtcagaatgttctgagcggacaactagtgaatgcggcggtgccgtgtttgaagagtttatgccaatcaagtggagttctgcttcatctgatgaaaccgataaagatgaagaagctgagaaaactgagatgatgaccaatgaaaataacgatggtgataagaagaaatcggattggcttagatctgttcaattatggaaccaatcaccagatccacaacctaataataagaaaccgatggtaattgaagtcaaacgcagcgctggtgcgtttcaaccgtttcaaaaggagaaacctaaggctgcagattctcaaccacttattaaagcaattactccgacgtcgacgacgacaactagttccacggcggaaaccgtcgggggtggaaaagagtttgaggagcagaaacaatctcattcgaataggaagcaaagacgttgctggtcaccggagttacaccgcagattcttgcacgcgcttcaacaacttggtggatcacatgttgctacgcctaagcagattagagatcttatgaaggtcgatggtttaactaatgacgaagttaaaagtcatttacagaaatatagattgcatacaagaagaccagctactccggtagtaaggaccggtggtgaaaatccacaacaacggcagtttatggtgatggaaggcatttgggtaccttcacacgatacaactaataatagagtttacgctcctgtggcgtcacaaccgccgcaatcttcaacgtcgggagagagaagcaatcggggttgcaaatctcccgcaacatcttctactactacacacacaccacaccttcttcctctttcataaatatatagttaccgatttgtatgaaaatttgttttcttctttatatatttgttttgt

SEQ ID NO: 200 - protein, 344 aa, Arabidopsis thaliana
  misc_feature (1)..(344): Ceres CDNA ID no. 23377122
  misc_feature (1)..(344): Also Known As Ceres GEMINI ID 555A3
  misc_feature (1)..(344): Also Known As Ceres CLONE ID 1959
  misc_feature (211)..(262): Pfam Name: Myb_DNA-binding; Pfam Description: Myb-like DNA-binding domain
MMMFKSGDMDYTQKMKRCHEYVEALEEEQKKIQVFQRELPLCLELVTQAIESCRKELSESSEHVGGQSECSERTTSECGGAVFEEFMPIKWSSASSDETDKDEEAEKTEMMTNENNDGDKKKSDWLRSVQLWNQSPDPQPNNKKPMVIEVKRSAGAFQPFQKEKPKAADSQPLIKAITPTSTTTTSSTAETVGGGKEFEEQKQSHSNRKQRRCWSPELHRRFLHALQQLGGSHVATPKQIRDLMKVDGLTNDEVKSHLQKYRLHTRRPATPVVRTGGENPQQRQFMVMEGIWVPSHDTTNNRVYAPVASQPPQSSTSGERSNRGCKSPATSSTTTHTPHLLPLS

SEQ ID NO: 201 - protein, 379 aa, Glycine max
  misc_feature (1)..(379): Ceres CLONE ID no. 467905
  misc_feature (1)..(379): Functional Homolog of  Ceres CDNA ID no. 23377122 at SEQ ID NO. 200 with e-value of 2.09E-67 and percent identity of 55.4
MQFAQKMQPLKMGFLQYIEALEEERRKIQVFPKELPLSLELVTQAIEACRQQLAGTVAEYNLNGQSECSEQTSTDGPVFEEFIPLKKRASQDSVEEEDEDEEHFHKHKKTATDKKKSDWLRSVQLWNPNPPPTKEDVVVPRKTDVVEVKRNGGAFQPFQREEKSGDAKASINNDASAIGKAPSSPPVPATSSTGPVRVENKKEEKGQAQRKQRRCWSQELHKRFLHALQQLGGADSATPKQIRELMKVDGLTNDEVKSHLQKFRLHTRRSPIIHNNASSQAGPLFLVGNIFVQPPEYAAVATTSTASGEELTTVTTTTAPTGIYAPVAAHPPAVTHTLPIMKQKEHSHSEERPNHSVLSNSPASSSSTHTITTSPPVPN

SEQ ID NO: 202 - protein, 412 aa, Oryza sativa subsp. japonica
  misc_feature (1)..(412): Public GI no. 50907599
  misc_feature (1)..(412): Functional Homolog of  Ceres CDNA ID no. 23377122 at SEQ ID NO. 200 with e-value of 1.30E-58 and percent identity of 52.5
MEVDHADRDGARRRCREYLLALEEERRKIQVFQRELPLCFDLVTQTIEGMRSQMDAAGSEETVSDQGPPPVLEEFIPLKPSLSLSSSEEESTHADAAKSGKKEEAETSERHSSPPPPPPEAKKVTPDWLQSVQLWSQEEPQQPSSPSPTPTKDLPCKPVALNARKAGGAFQPFEKEKRAELPASSTTAAASSTVVGDSGDKPTDDDTEKHMETDKDNDKDAKDKDKEGQSQPHRKPRRCWAPELHRRFLQALQQLGGSHVATPKQIRELMKVDGLTNDEVKSHLQKYRLHTRRPSSTGQSSAAAGVPAPPAPQFVVVGSIWVPPPEYAAAAAAQQHVQLAAAGNNASGSANPVYAPVAMLPAGLQPHSHRKQHQQQQQGQRHSGSEGRRSGDAGDGSSSSPAVSSSSQTTSA

SEQ ID NO: 203 - protein, 402 aa, Triticum aestivum
  misc_feature (1)..(402): Ceres CLONE ID no. 826195
  misc_feature (1)..(402): Functional Homolog of  Ceres CDNA ID no. 23377122 at SEQ ID NO. 200 with e-value of 4.10E-55 and percent identity of 49.6
MEMDVPPAQADRDGARRRLRDYLLALEEERRKIHVFQRELPLCLDLVTQTIEGMKSQMGGAASEETVSDHGGPVLEEFIPLKPSLSLSSSDDETSTHAAVAPVSNAKAETPPPTPETKKAMPDWLQCAQLSSAWSEPQQSSSLQKVLPCRPVALNATRTGGAFHPFEKEKQPEPELPASSTTAPASSALVGDSGDKATSDTEVHDKDSKDATEKDTEKDKDKEGQSQPPNNRKPRRCWAPELHRRFLQALQQLGGSHVATPKQIRELMKVDGLTNDEVKSHLQKYRLHTSRRPSSTAQSGGAPATQPTPQFFVVGSCIWVPQQEYAAAAAAAAAAAEATNVAPGSANQVYAPTATLPSGSKPHLEKQSSRQSEGPRSGVNSDSDNPTMSLSSSSQATSAGHP

SEQ ID NO: 204 - protein, 362 aa, Zea mays
  misc_feature (1)..(362): Ceres CLONE ID no. 450772
  misc_feature (1)..(362): Functional Homolog of  Ceres CDNA ID no. 23377122 at SEQ ID NO. 200 with e-value of 4.89E-36 and percent identity of 37.6
MGLDVGEIGMGLDLGLDLRLFAARSAGGMAKGAAPAGIQSCIRSLEVERRKIEVFRRELPLCLRLLADVIDELKEEAAKRGEYDDGAATVDDGDKRKWMSTAQLWVDSDAKSDESDKEQQSEITSPPEPKLLGGGAPTPIRAAVSAVAVPQPLPPPLFRREDSSASSGLSLVSLSPATKAAVPISPPVVAASGTGTASARFCGTTMPPCGSEVNNMHSQAQQQQQASRKARRCWSPELHRRFVAALHELGGPQVATPKQIREVMQVDGLTNDEVKSHLQKYRLHNRRSSPGAAAAPVSQSIMLVDGVWAAQEQSSGSQSGSRQGPLQFSRAGMAVGGGDDSSSSDDDEDDDKSEDGYSLKCV

SEQ ID NO: 205 - DNA, 1332 bp, Arabidopsis thaliana
  misc_feature (1)..(1332): Ceres CDNA ID no. 23388445
  misc_feature (1)..(1332): Also Known As Ceres GEMINI ID 555A1
  misc_feature (1)..(1332): Also Known As Ceres CLONE ID 117089
gtcggaaaatacggacggcgtcgtcgttctttttgacggtgtagctcaccggcgacgatttttagatttttttttaagggaaacactaagcagcaaattacaagtgggtgatttgtgtttgttacataatcttatatctaactatgtcagattctggtgagcctaaaccttctcagcaagaagagcctctacctcaacctgctgcccaagaaactcagtctcaacaagtttgcactttcttcaagaagccaacgaaaagtaaaaacataagaaaaagaaccattgacgctgatgaagaagacggagattcgaaaagcgaaagctctattctacaaaatctaaagaaagttgcaaaacccgatagcaagttatacttttcttctggaccatctaagagctctactacaacgagtggagctcctgagagatccgtctttcactacgattcatccaaggaaatccaggttcagaacgacagtggagcaacagcaacccttgaaactgagaccgacttcaatcaagacgcacgagctatccgtgagagagttcttaaaaaagcagacgaagcattgaaagggaataagaaaaaggcttctgatgagaagctgtacaaaggaattcatggatatacagatcacaaagctgggtttagaagagaacaaacaatctcgagcgagaaagctggaggctcacacgggccattaagagcttctgctcacataagagtgtcggctagatttgattaccagccagacatttgcaaggattacaaagaaaccggatactgtggatatggagattcgtgtaagttcttgcatgaccgtggggattacaaaccgggatggcagatagagaaagagtgggaagaagcagagaaagttaggaagagaaataaagctatgggagttgaggatgaagatgatgaggctgacaaggatagcgacgaagacgaaaatgcattgccctttgcttgcttcatttgcagggagccatttgttgatccagttgtcaccaaatgcaagcattacttctgtgagcattgtgctttaaagcatcacacgaagaacaagaagtgctttgtgtgtaaccaaccaacaatggggattttcaatgcagcacatgagatcaagaagagaatggctgaagaacggagtaaagctgaagaaggattgtgaagtccttgtttcactggacaaaaaggcaaaaactatatttggttatttagctttttgttttgttgtactcactggcctacatatattcattcggatgacgacgatgtttgtttcaaactgattaacttttaaatttaaacaaactgaaaattgaatc

SEQ ID NO: 206 - protein, 343 aa, Arabidopsis thaliana
  misc_feature (1)..(343): Ceres CDNA ID no. 23388445
  misc_feature (1)..(343): Also Known As Ceres GEMINI ID 555A1
  misc_feature (1)..(343): Also Known As Ceres CLONE ID 117089
  misc_feature (201)..(227): Pfam Name: zf-CCCH; Pfam Description: Zinc finger C-x8-C-x5-C-x3-H type (and similar)
  misc_feature (277)..(314): Pfam Name: zf-C3HC4; Pfam Description: Zinc finger, C3HC4 type (RING finger)
MSDSGEPKPSQQEEPLPQPAAQETQSQQVCTFFKKPTKSKNIRKRTIDADEEDGDSKSESSILQNLKKVAKPDSKLYFSSGPSKSSTTTSGAPERSVFHYDSSKEIQVQNDSGATATLETETDFNQDARAIRERVLKKADEALKGNKKKASDEKLYKGIHGYTDHKAGFRREQTISSEKAGGSHGPLRASAHIRVSARFDYQPDICKDYKETGYCGYGDSCKFLHDRGDYKPGWQIEKEWEEAEKVRKRNKAMGVEDEDDEADKDSDEDENALPFACFICREPFVDPVVTKCKHYFCEHCALKHHTKNKKCFVCNQPTMGIFNAAHEIKKRMAEERSKAEEGL

SEQ ID NO: 207 - protein, 378 aa, Arabidopsis thaliana
  misc_feature (1)..(378): Public GI no. 21618279
  misc_feature (1)..(378): Functional Homolog of  Ceres CDNA ID no. 23388445 at SEQ ID NO. 206 with e-value of 0.0 and percent identity of 91.47
MEPFVVKENIVASASSPMKKRRIDHTESADGSAINASNSSSIGGNDTVMNMAEFGNDNSNNQESQQVCTFFKKPTKSKNIRKRTIDADEEDGDSKSESSILQNLKKVAKPDSNLYFSSGPSTRTSGAPERPVFHYDSSKEIQVQNDSGATATLETETDFNQDARAIRERVLKKADHALKGNKKKASDEKLYKGIHGYTDHKAGFRREQTISSEKAGGSHGPLRASAHIRVSARFDYQPDICKDYKETGYCGYGDSCKFLHDRGDYKPGWQIEKEWEEAEKVRKRNKAMGVEDDDDEADKDSDEDENALPFACFICREPFLDPVVTKCKHYFCEHCALKHHTKNKKCFVCNQPTMGIFNAAHEIKKRMAEERSKAEQGL

SEQ ID NO: 208 - protein, 378 aa, Arabidopsis thaliana; identical to SEQ ID NO: 207
  misc_feature (1)..(378): Ceres CLONE ID no. 3542
  misc_feature (1)..(378): Functional Homolog of  Ceres CDNA ID no. 23388445 at SEQ ID NO. 206 with e-value of 0.0 and percent identity of 91.47

SEQ ID NO: 209 - protein, 378 aa, Arabidopsis thaliana
  misc_feature (1)..(378): Ceres CLONE ID no. 29363
  misc_feature (1)..(378): Functional Homolog of  Ceres CDNA ID no. 23388445 at SEQ ID NO. 206 with e-value of 0.0 and percent identity of 91.18
MEPFVVKENIVASASSPMKKRRIDHTESADGSAINASNSSSIGGNDTVMNMAEFGNDNSNNQESQQFCTFFKKPTKSKNIRKRTIDADEEDGDSKSESSILQNLKKVAKPDSNLYFSSGPSTRTSGAPERPVFHYDSSKEIQVQNDSGATATLETETDFNQDARAIRERVLKKADHALKGNKKKASDEKLYKGIHGYTDHKAGFRREQTISSEKAGGSHGPLRASAHIRVSARFDYQPDICKDYKETGYCGYGDSCKFLHDRGDYKPGWQIEKEWEEAEKVRKRNKAMGVEDDDDEADKDSDEDENALPFACFICREPFLDPVVTKCKHYFCEHCALKHHTKNKKCFVCNQPTMGIFNAAHEIKKRMAEERSKAEQGL

SEQ ID NO: 210 - protein, 378 aa, Arabidopsis thaliana
  misc_feature (1)..(378): Public GI no. 23198042
  misc_feature (1)..(378): Functional Homolog of  Ceres CDNA ID no. 23388445 at SEQ ID NO. 206 with e-value of 0.0 and percent identity of 90.88
MEPFVVKENIVASASSPMKKRRIDHTESADGSAINASNSSSIGGNDTVMNMAEFGNDNSNNQESQQVCTFFKKPTKSKNIRKRTIDADEEDGDSKSESSILQNLKKVAKPDSNLYFSSGPSTRTSGAPERPVFHYDSSKEIQVQNDSGATATLETETDFNQDARAIRERVLKKADHALKGNKKKASDEKLYKGIHGYTDHKAGFRREQTISSEKAEGSHGPLRASAHIRVSARFDYQPDICKDYKETGYCGYGDSCKFLHDRGDYKPGWQIEKEWEEAEKVRKRNKAMGVEDDDDEADKDSDEDENALPFACFICRDPFLDPVVTKCKHYFCEHCALKHHTKNKKCFVCNQPTMGIFNAAHEIKKRMAEERSKAEQGL

SEQ ID NO: 211 - protein, 288 aa, Glycine max
  misc_feature (1)..(288): Ceres CLONE ID no. 1104497
  misc_feature (1)..(288): Functional Homolog of  Ceres CDNA ID no. 23388445 at SEQ ID NO. 206 with e-value of 2.19E-85 and percent identity of 50.59
  misc_feature (85)..(85): Xaa is any aa, unknown, or other
MTKKVAAATIPGPSRRRDLRSRRLLPASSSSPPPTTHTSPAVSSSSRPGLFSPLPTTAPLRRLRRRRRTTVMRAPSASDSSSRLXNPLKKNPSASSSSGELYKGIHGYTDHKAGFRREHTVSGEKAGGAHGPLRASAHIRLSTRFDYQPDICKDYKETGYCGYGDSCKFMHDRGDYKSGWQLEREWDEAEKARKRRIAMRELGGSDGEAEEEDSDDEEALPFACFICREPFVDPVVTKCKHYFCEHCALKHHSKNKKCFVCNKPTLGIFNAAQEIRKKIAQDKKQQDL

SEQ ID NO: 212 - protein, 329 aa, Glycine max
  misc_feature (1)..(329): Ceres CLONE ID no. 538877
  misc_feature (1)..(329): Functional Homolog of  Ceres CDNA ID no. 23388445 at SEQ ID NO. 206 with e-value of 1.49E-125 and percent identity of 69.42
MEDSDQPAKSAENQQTEQVCSFFRKPVNKKNIRKRTIVNEDNEEDSNNETSLLHIQKKTLKPDNKLYFSTGSSKSSASAEPSEEPGKPVFQFESSKEIQVQHDSKATATLETETEFSKDARAIRERALKQAEESLKGKSPSSKNEKLYKGMNSYKDYKAGFRREQTIASEKAGGSHGPLRASAHIRVSARFDYQPDICKDYKETGYCGYGDSCKFMHDRGDYKSGWQMEKEWEEAEKARKMRLAAGEDADEEGANLTDEDDEDSLPFACFICRNTFVDPVVTKCKHYFCEHCALKHHAKNKKCFVCNQPTLGIFNVAHEIRRKMAEDKS

SEQ ID NO: 213 - protein, 326 aa, Oryza sativa subsp. japonica
  misc_feature (1)..(326): Public GI no. 50907243
  misc_feature (1)..(326): Functional Homolog of  Ceres CDNA ID no. 23388445 at SEQ ID NO. 206 with e-value of 8.29E-111 and percent identity of 68.14
MADGGGGGEAGSGGSAPVCSFVRKPPKNIRKRPTAPAGSDDDDEDGSGAIAAARAKKAPSSTSKLFFSSADGSSEPRRFQYESSRTIQASTDSRATATLETETEFDRDARAIRERQLKQAEESLKKNPSAPASSSGSGSGEVYKGIHGYTDYKAGFRREHTVSSEKAGGSHGPLRASAHIRLSARFDYQPDICKDYKETGYCGYGDSCKFMHDRGDYKSGWQIEKEWEEAEKARKRRIAMGGDGSDYEAGEEDDDDDEEALPFACYICREPFVDPVVTKCKHYFCEHCALKHHSKNKKCFVCNKPTLGIFNAAQEIRKKMAQDKKQ

SEQ ID NO: 214 - protein, 331 aa, Zea mays
  misc_feature (1)..(331): Ceres CLONE ID no. 260992
  misc_feature (1)..(331): Functional Homolog of  Ceres CDNA ID no. 23388445 at SEQ ID NO. 206 with e-value of 1.90E-104 and percent identity of 62.65
MADGGNGGPGGGNASAPVCSFVRKPPKNIRKRPAAPAGSDDDDDGGGGALAAARSKKGPPSSTAGKLVFSTAGASSEAPRFQYESSRTIQSTDTRATATLETETEFDRDARSIRERQLKQAEESLKKNPSAVAASASASTAGEVYKGIHGYTDYKAGFRREHTVSSEKAGGSHGPLRASAHIRLSQRFDYQPDICKDYKETGYCGYGDSCKFMHDRGDYKSGWQLEKEYEEAEKARKRRIAMGGGGESDDEAADDEDEEEALPFACFICREPFVDPVVTKCKHYFCEHCALKHHSKNKKCYVCNKPTLGIFNAAQEIRKKMAQDKKQQQQE

SEQ ID NO: 215 - protein, 325 aa, Triticum aestivum
  misc_feature (1)..(325): Ceres CLONE ID no. 634320
  misc_feature (1)..(325): Functional Homolog of  Ceres CDNA ID no. 23388445 at SEQ ID NO. 206 with e-value of 3.30E-107 and percent identity of 66.04
MSDGGGEPGAGGSAPVCNFVQKPPKNIRKRPAASVGSDDEEGSGGDDSGAIAAARSKKPPPTTSKLFFSSADNSHEPRRFQFESSRTIQSSTDNRATATLETETAYDRDARAIRERQLKQAEESLKKNPSASSSSGELYKGIHGYTDHKAGFRREHTVSGEKAGGAHGPLRASAHIRLSTRFDYQPDICKDYKETGYCGYGDSCKFMHDRGDYKSGWQLEREWDEAEKARKRRIAMRELGGSDGEAEEEDSDDEEALPFACFICREPFVDPVVTKCKHYFCEHCALKHHSKNKKCFVCNKPTLGIFNAAQEIRKKIAQDKKQQDL

SEQ ID NO: 216 - DNA, 777 bp, Glycine max
  misc_feature (1)..(777): Ceres CDNA ID no. 23395214
  misc_feature (1)..(777): Also Known As Ceres GEMINI ID 531G11
  misc_feature (1)..(777): Also Known As Ceres CLONE ID 605218
aacacacacattggtgtttccaccaaatacagtgagcaaagttagctgaaaattaaaacatggtttccgccaccgtggattccgattttgcattcttggaatctgttcaacaatacctacttggacatgattccatcaatctcatgtctgaaacccaccaagctgcatctcatgatccattttcagaccctaataaatgtgatggtgattcagggaacattgctttccgaagtgaggatgcaacggctgtggtagcgcgtgatcatgcgccaccaacatggaagcattacagaggggtgaggcgtagaccgtggggaaagtttgcggccgagattagggatccaaagaagaacggagctagggtttggcttggcacgtatgataccgaagagaaggccgctttggcatatgacaaagccgctttcaaaatgcgaggccaaaaggccaagctgaattttcctcatcttattgattccgacaattccgatgaattgtcggagccagtaatgatgacaacttccaagcgaagtttgttagaaatttcatcaccgtcgtcctcgtgttcagatgatagctcagaatcacaagggacaaagaggaggaagagcctggctgaactactgaataaattagccaagaatagaagccaagtcaaggtggaatgttgaagtggctagaggaatatgcatgttgtacaatttgatcaatcattaatatgagacttcaacgattgtaatgtaatctggtgttcatagaattaatgcaattttgttcacc

SEQ ID NO: 217 - protein, 202 aa, Glycine max; identical to SEQ ID NO: 125
  misc_feature (1)..(202): Ceres CDNA ID no. 23395214
  misc_feature (1)..(202): Also Known As Ceres GEMINI ID 531G11
  misc_feature (1)..(202): Also Known As Ceres CLONE ID 605218
  misc_feature (75)..(139): Pfam Name: AP2; Pfam Description: AP2 domain

SEQ ID NO: 218 - DNA, 884 bp, Arabidopsis thaliana
  misc_feature (1)..(884): Ceres CDNA ID no. 23447935
  misc_feature (1)..(884): Also Known As Ceres GEMINI ID 531H9
  misc_feature (1)..(884): Also Known As Ceres CLONE ID 21374
gcattaaaaagggttcaaagaaaaattctcaaattctctaacaaagagctctgagatttttggaaatctgaatcgttgttcgaggtttaatgttaccatttccggcaatgaacttgaagaagtctcgatcggaaaactcatcagttgcttcatctggaagtgagattgaagagcagactgagaaatcagctgaaccaacaaccattaaggtgcagaaaaaagccggtactccagggaggtcgatagatgtctttgctgtgcagtgtgagaagtgcatgaagtggagraagattgaatactcaagatgagtatgaagatatcagaagtagagtacaagaggacccgtttttttgcaagacgaaagaaggtgtgtcctgtgaagatgttggagatcttaaactatgattcctccagaacatgggtcatcgacaagcctggcttgccgaggacaccaagagggttcaaaaggagcttaattctgagaaaggattactcgaaaatggatgcgtactacataactcctactgggaagaagctcaagtctcgtaatgaaatcgcagccttcatcgatgccaatcaggattacmagtatgcactgcttggagatttcaatttcacagtcccaaaggtgatggaagagacggttcctagtgggatattatctgacaggacccccaagccatcaaggaaagttacaattgattgagctacatagcgcttcccagcttcttatggtgttgaagttgttattggagtcagttttaggtttctatctggtttagtcttttaagggtgtcggacttcttactgtagaatgtttcttaaactcatctctttgactctgattggatctttattttctaatgaaggattatcttttcttc

SEQ ID NO: 219 - protein, 204 aa, Arabidopsis thaliana
  misc_feature (1)..(204): Ceres CDNA ID no. 23447935
  misc_feature (1)..(204): Also Known As Ceres GEMINI ID 531H9
  misc_feature (1)..(204): Also Known As Ceres CLONE ID 21374
  misc_feature (110)..(183): Pfam Name: MBD; Pfam Description: Methyl-CpG binding domain
  misc_feature (54)..(103): Pfam Name: zf-CW; Pfam Description: CW-type Zinc Finger
MLPFPAMNLKKSRSENSSVASSGSKIEEQTEKSAEPTTIKVQKKAGTPGRSIDVFAVQCEKCMKWRKIDTQDEYEDIRSRVQEDPFFCKTKEGVSCEDVGDLNYDSSRTWVIDKPGLPRTPRGFKRSLILRKDYSKMDAYYITPTGKKLKSRNEIAAFIDANQDYKYALLGDFNFTVPKVMEETVPSGILSDRTPKPSRKVTID

SEQ ID NO: 220 - DNA, 1628 bp, Glycine max
  misc_feature (1)..(1628): Ceres CDNA ID no. 23704869
  misc_feature (1)..(1628): Also Known As Ceres GEMINI ID 555C4
  misc_feature (1)..(1628): Also Known As Ceres CLONE ID 674157
gtataggagtactgttactggtcgataggaaagaaaatatggaatgtcctggccccggtattgtactattttcattttgaccaatatgccccgggcctctccttttgtgtagctgcgtgcctccctccatccccatcgcatcacacagaatcaaaggaaaggagacgtacgatacgatacgatacgatatggatagggtattctcagtggacaatatctccgatcatttctggccgccgcctccgatccccgtctccggcgccaacacctcctctcagatgagccgcagcgcctccgagtgggcctttcagcgcttcatccaggaagcttccgcctccgcaccctctcctccgtcttcttcctcccccgccgacgtcgtattcgtggagatcgatgatcagcccaaacccacccctccgcctccgtcacacggcggcgttctgcccagtgaccctggtcccgtggcccttgactccgaggaataccaggcctttctcaagagcaagctcaacctcsgcatgcgccgccgtcgccatgactaggggatctttggctaaatctcaagacccgtcccctttttctgatggtggatcacagccgactaatccttctctagttggatctcagactacttctaaaggatctattccttctggaaatgatcaatctaagttacaagataaagatatcaatgcaccagttgggattccttccatacctgccatacaaaagaaacctgctgttgcaattaggccatctacaagtggatcatcaagagaacagtcagatgatgaggacattgagggagagacatctatgaatgacaacacagaccctgctgatgtaaaacgagtaaggaggatgctatccaatagggagtcagcccgtcgctctagaagaagaaagcaggctcatttaactgacctagaaacacaggtttctcaattaagaggtgaaaattctaccttgttaaagcgccttactgatgttagtcagaaatacagcgactctgctgttgacaacagagttttaaaagctgatgttgaaacattaagagcaaaggtgaagatggctgaagagaccgtcaaaagaattactgggttgaacccaatgcctcatgccatgtctgatatatcatcattgggcctgccatcatttgatggaagaagcccttcagacacttcagctgatgcatctgttcctgtgcaagatgatccacatcatcacttctatcaacccacattgaataatcctattcccagtcatgatccgatagtcaacaatggtttggggggcatttcttcaattgaaaatgtgcagcagcagaacgctgcagcagtggtaggtgggaacaagataggtcaaacagcatccctgcagcgggtggctagcttggaacatcttcagaagcggattcgtggtggacctccatctgagcagtaactaagtagccagatcttaaggttgctttgccaaaaaattattctaaaacagttatttctgttgcctattcttctggaatacattgtaaatcatttgatggagcacatgatgctggattcaattagtgcaccccgtttttttttttttttttttataaaaataatataaaatgaacctttaccttc

SEQ ID NO: 221 - protein, 349 aa, Glycine max
  misc_feature (1)..(349): Ceres CDNA ID no. 23704869
  misc_feature (1)..(349): Also Known As Ceres GEMINI ID 555C4
  misc_feature (1)..(349): Also Known As Ceres CLONE ID 674157
  misc_feature (148)..(202): Pfam Name: bZIP_2; Pfam Description: Basic region leucine zipper
  misc_feature (41)..(41): Xaa is any aa, unknown, or other
MISPNPPLRLRHTAAFCPVTLVPWPLTPRNTRPFSRASSTXACAAVAMTRGSLAKSQDPSPFSDGGSQPTNPSLVGSQTTSKGSIPSGNDQSKLQDKDINAPVGIPSIPAIQKKPAVAIRPSTSGSSREQSDDEDIEGETSMNDNTDPADVKRVRRMLSNRESARRSRRRKQAHLTDLETQVSQLRGENSTLLKRLTDVSQKYSDSAVDNRVLKADVETLRAKVKMAEETVKRITGLNPMPHAMSDISSLGLPSFDGRSPSDTSADASVPVQDDPHHHFYQPTLNNPIPSHDPIVNNGLGGISSIENVQQQNAAAVVGGNKIGQTASLQRVASLEHLQKRIRGGPPSEQ

SEQ ID NO: 222 - protein, 450 aa, Nicotiana tabacum
  misc_feature (1)..(450): Public GI no. 16797791
  misc_feature (1)..(450): Functional Homolog of  Ceres CDNA ID no. 23704869 at SEQ ID NO. 221 with e-value of 4.20E-101 and percent identity of 62.3
MERVFSMEDDIGDHFWSTPPTADLGVDSPTAAAAVSYSKMMNRSSSEWAFQRFLQEATAAGTSTSSPPQPPTMTASSSSSSHQNDVVEIKDENLSIPNLNPSTALNSKPASSFGLAPPPNIAVDSEEYQAFLKSQLHLACAAVALTRGKSLNPQDSGSTAHDKGSETASAAQSGSHVSTLGSGQEVAKIQDKDAGGPVGIPSLPPVQKKPVVQVRSTTSGSSREQSDDDEAEGEAETTQGMDPADAKRVRRMLSNRESARRSRRRKQAHLTELETQVSQLRVENSSLLKRLTDISQKYNEAAVDNRVLKADVETLRTKVKMAEETVKRVTGLNPLFQAMSEISSMVMPSYSGSPSDTSADAAVPVQDDPKHHYYQQPPNNLMPTHDPRIQNGMVDVPPIENVEQNPATAAVGGNKMGRTTSMQRVASLEHLQKRIRGEVSSCGTQGRGEQ

SEQ ID NO: 223 - protein, 401 aa, Petroselinum crispum
  misc_feature (1)..(401): Public GI no. 1806261
  misc_feature (1)..(401): Functional Homolog of  Ceres CDNA ID no. 23704869 at SEQ ID NO. 221 with e-value of 7.20E-90 and percent identity of 59.8
MDRVFSVEDISDQFWSPPAREDSSKLVMNRSDSEWAFQSFLQQASALESSQPLPSDPVPVAGDVKNPVEIPANVPVDSEDYQAYLKSRLDLACAAVALTRASSLKPQDSAALLDNGSQASNTSQLVSQVPPKGSGHDLSKEEDKEALAATATPLLPALQKKSAIQVKSTTSGSSRDHSDDDDELEGETETTRNGDPSDAKRVRRMLSNRESARRSRRRKQAHMTELETQVSQLRVENSSLLKRLTDISQRYNDAAVDNRVLKADIETMRAKVKMAEETVKRVTGLNPMFQSMSSEISTIGMQSFSGSPSDTSADTTQDGSKQHFYQPAPTSHMPAQDQKIQNGLLQVPPVDNLQQHSASGPVEGNKMERTSSMQRVASLEHLQKRIRGGVSSCEAQVSGKQ

SEQ ID NO: 224 - protein, 410 aa, Zea mays
  misc_feature (1)..(410): Ceres CLONE ID no. 295738
  misc_feature (1)..(241): Functional Homolog of  Ceres CDNA ID no. 23704869 at SEQ ID NO. 1365 with e-value of 2.60E-60 and percent identity of 54.5
MERVFSMEEIPNPYWAPPHPQPAAGGAVAAPGGVGGAGDAAGAMNRCPSEWYFQKFLEEAVLDSPGPVAGVGRSSGQAGVEAAESKPLGAAAPASVSSSVVDPVEYNAMLKQKLEKDLAAIAMWRASGAAPPDLSATAASLPSVGAPHAAPLKPVGGTESLVQNMLAGAPVGGSGPHIVQIADIPVKQTTSSSSREQSDDDDMEGDAETNGNGNPVQQRQQRRKQSNRESARRSRSRKAAHLNELEAQVAQLRVENSSLLRRLADVNQKFNEAAVDNRVLKADVETLRAKVKMAEDSVKRVTGMNALYPAVSDMSSLSMPFNGSPSDSASDSTVPVQDDLNSYFANPSEIGGNNGYMPDIASSVQQDDNFVNGYQAAGKMGRTDSLQRVASLEHLQKRMCGGPASSGSTS

SEQ ID NO: 225 - protein, 410 aa, Zea mays
  misc_feature (1)..(410): Public GI no. 168428
  misc_feature (1)..(410): Functional Homolog of  Ceres CDNA ID no. 23704869 at SEQ ID NO. 221 with e-value of 5.50E-60 and percent identity of 54.5
MERVFSMEEIPNPYWAPPHPQPAAGGAVAAPGGVGGAGDEAGAMNRCPSEWYFEKFLEEAVLDSPGPVAGVGRSSGQAGVEAAESKPLGAAAPASVSSSVVDPVEYNAMLKQKLEKDLAAIAMWRASGAAPPDLSATAASLPSVGVPHAAPLKPVGGTESLVQNMLAGAPVGGSGPHIVQIADIPVKQTTSSSSREQSDDDDMEGDAETNGNGNPVQQRQQRRKQSNRESARRSRSRKAAHLNELEAQVAQLRVENSSLLRRLADVNQKFNEAAVDNRVLKADVETLRAKVKMAEDSVKRVTGMNALYPAVSDMSSLSMPFNGSPSDSASDSTVPVQDDLNSYFANPSEIGGNNGYMPDIASSVQQDDNFVNGYQAAGKMGRTDSLQRVASLEHLQKRMCGGPASSGSTS

SEQ ID NO: 226 - protein, 405 aa, Zea mays
  misc_feature (1)..(405): Public GI no. 1144536
  misc_feature (1)..(405): Functional Homolog of  Ceres CDNA ID no. 23704869 at SEQ ID NO. 221 with e-value of 4.79E-61 and percent identity of 54.3
MERVFSVEEIPNPYWVPPHPQSAAAGAVAAPAGEAAGLMNRCPSEWYFQKFLEEAVLDSPVPVAGASRGSVGAGVEAAESKTPGAAARAAASSSVVDPVEYNAMLKQKLEKDLAAVALWRASGAAPPDHSPAGSSLPSVDVPHAGPLKPIGGTGSLVQNKLLGAPGGGSSPHVLQNADIPVKQTTSSSSREQSDDDDMEGDAETSGNGNPVQHRLQRRKQSNRESARRSRSRKAAHLNELEAQVSQLRVENSSLLRRLADVNQKFNEAAVDNRVLKADVETLRAKVKMAEDSVKRVTGMNTLFPAVSDMSSLSMPFNGSPSDSASDAAVPIQDDLNSYFANPSEIGGSNGYMPDIASSVQEDDDFVNGAQVAGKMGSTDSLQRVASLEHLQKRMCGGPASSGSTS

SEQ ID NO: 227 - protein, 425 aa, Oryza sativa
  misc_feature (1)..(425): Public GI no. 7489532
  misc_feature (1)..(425): Functional Homolog of  Ceres CDNA ID no. 23704869 at SEQ ID NO. 221 with e-value of 7.80E-61 and percent identity of 53.6
MERVFSVEEISDPFWVPPPPPQSAAAAQQQGGGGVASGGGGGVAGGGGGGNAMNRCPSEWYFQKFLEEAVLDSPVPNPSPRAEAGGIRGAGGVVPVDVKQPQLSAAAAAAATTSAVVDPVEYNAMLKQKLEKDLAAVAMWRASGTVPPERPGAGSSLLNADVSHIGAPISIGGNATPVQNMLSGPSGGSGSQLVQNVDVLVKQATSSSSREQSDDDDMEGEAETTGTARPADQRLQRRKQSNRESARRSRSRKAAHLNELEAQVSQLRVENSSLLRRLADVNQKYNDAAVDNRVLKADVETLRAKVKMAEDSVKRVTGMNALFPAASDMSSLSMPFNSSPSEATSDAAVPIQDDPNNYFATNNDIGGNNNYMPDIPSSAQEDEDFVNGALAAGKIGRTASLQRVASLEHLQKRMCGGPASSGSTS

SEQ ID NO: 228 - protein, 405 aa, Zea mays
  misc_feature (1)..(405): Public GI no. 542187
  misc_feature (1)..(405): Functional Homolog of  Ceres CDNA ID no. 23704869 at SEQ ID NO. 221 with e-value of 9.90E-61 and percent identity of 53.4
MERVFSVEEIPNPYWVPPHPQSAAAGAVAAPAGEAAGLMNRCPSEWYFQKFLEEAVLDSPVPVAGVSRGSVGAGVEAAERKTPGTAAAAAASSSVVDPVEYNAIVKQKLEKDLAAVALWRASGAAPPDNSPAGSSLPSVDVPHAGPLKPMGGTGSLVQNKLAGAPGGGSSPHVVQNADIPVKQTTSSSSREQSDDDDMEGDAETTGNGNPVQQRLQRRKQSNRESARRSRSRKAAHLNELEAQVAQLRVENSSLLRRLADVNQKFNEAAVDNRVLKADVETLRAKVKMAEDSVKRVTGMNTLFPAVSDMSSLSMPFNGSPSDSASDAAVPIQDDLNSYFANPSEIGGSNGYMPDIASSAQEDDDFVNGAQVAGKMGSTDSLQRVASLEHLQKRMCGGPASSGSTS

SEQ ID NO: 229 - protein, 425 aa, Oryza sativa subsp. japonica
  misc_feature (1)..(425): Public GI no. 34897226
  misc_feature (1)..(425): Functional Homolog of  Ceres CDNA ID no. 23704869 at SEQ ID NO. 221 with e-value of 1.30E-60 and percent identity of 53.4
MERVFSVEEISDPFWVPPPPPQSAAAAQQQGGGGVASGGGGGVAGGGGGGNAMNRCPSEWYFQKFLEEAVLDSPVPNPSPRAEAGGIRGAGGVVPVDVKQPQLSAAAAAAATTSAVVDPVEYNAMLKQKLEKDLAAVAMWRASGTVPPERPGAGSSLLNADVSHIGAPNSIGGNATPVQNMLSGPSGGSGSQLVQNVDVLVKQPTSSSSREQSDDDDMEGEAETTGTARPADQRLQRRKQSNRESARRSRSRKAAHLNELEAQVSQLRVENSSLLRRLADVNQKYNDAAVDNRVLKADVETLRAKVKMAEDSVKRVTGMNALFPAASDMSSLSMPFNSSPSEATSDAAVPIQDDPNNYFATNNDIGGNNNYMPDIPSSAQEDEDFVNGALAAGKIGRTASLQRVASLEHLQKRMCGGPASSGSTS

SEQ ID NO: 230 - protein, 421 aa, Oryza sativa subsp. indica
  misc_feature (1)..(421): Public GI no. 4115746
  misc_feature (1)..(421): Functional Homolog of  Ceres CDNA ID no. 23704869 at SEQ ID NO. 221 with e-value of 1.10E-59 and percent identity of 52.9
MERVFSVEEISDPFWVPPPPPQSAAAAQQQGGGGVASGGGGGVAGGGGGGNAMNRCPSEWYFQKFLEEAVLDSPVPNPSPRAEAGGIRGAGGVVPVDVKQPQLSAAATTSAVVDPVEYNAMLKQKLEKDLAAVAMWKASGTVPPERPGAGSSLLNADVSHIGAPISIGGNATPVQNMLSGPSGGSGSQLVQNVDVLVKQPTSSSSREQSDDDDMEGEAETTGTARPADQRLQRRKQSNRESARRSRSRKAAHLNELEAQVSQLRVENSSLLRRLADVNQKYNDAAVDNRVLKADVETLRAKVKMAEDSVKRVTGMNALFPAASDMSSLSMPFNSSPSEATSDAAVPIQDDPNNYFATNNDIGGNNNYMPDIPSSAQEDEDFVNGALAAGKIGRPASLQRVASLEHLQKRMCGGPASSGSTS

SEQ ID NO: 231 - protein, 420 aa, Oryza sativa subsp. indica
  misc_feature (1)..(420): Public GI no. 15865782
  misc_feature (1)..(420): Functional Homolog of  Ceres CDNA ID no. 23704869 at SEQ ID NO. 221 with e-value of 3.50E-58 and percent identity of 52.6
MERVFSVEEISDPFWVPPPPPQSAAAAQQQGGGGVASGGGGGVAGGGGGGNAMNRCPSEWYFQKFLEEAVLDSPVPNPSPRAEAGGIRGAGGVVPVDVKQPQLSAAATTSAVVDPVEYNAMLKQKLEKDLAAVAMWRASGTVPPERPGAGSSLLNADVSHIGAPNSIGGNATPVQNMLSGPSGGSGSQLVQNVDVLVKQPTSSSSREQSDDDDMKGEAETTGTARPADQRLQRRKQSNRESARRSRSRKAAHLNELEAQVSQLRVENSSLLRRLADVNQKYNDAAVDNRVLKADVETLRAKKMAEDSVKRVTGMNALFPAASDMSSLSMPFNSSPSEATSDAAVPIQDDPNNYFATNNDIGGNNNYMPDIPSSAQEDEDFVNGALAAGKIGRPASLQRVASLEHLQKRMCGGPASSGSTS

SEQ ID NO: 232 - protein, 410 aa, Zea mays
  misc_feature (1)..(410): Ceres CLONE ID no. 235570
  misc_feature (1)..(410): Functional Homolog of  Ceres CDNA ID no. 23704869 at SEQ ID NO. 221 with e-value of 2.39E-59 and percent identity of 51.9
MERVFSMEEIPNPYWAPPHPQPAAGGAVAAPGGVGGGGDAAGAMNRCPSEWYFQKFLEEAVLDSPGPVAGVGRNSGQAGVEAAESKPLGAAAPASVSSSVVDPVEYNAMLKQKLEKDLAAIAMWRASGAAPPDLSAAAASLPSVDVPHAAPLKPVGGTESLVQNMLAGAPVGGSGPHVVQIADIPVKQTTSSSSREQSDDDDMEGDAETNGNGNPVQQRQQRRKQSNRESARRSRSRKAAHLNELEAQVAQLRVENSSLLRRLADVNQKFNEAAVDNRVLKADVETLRAKVKMAEDSVKRVTGMNALYPAVSDMSSLSMPFNGSPSDSASDSTVPVQDDLNSYFANPSEIGGNNAYMPDIASSVQQDDNFVNGYQAAGKMGRTDSLQRVASLEHLQKRMCGGPASSGSTS

SEQ ID NO: 233 - protein, 379 aa, Sorghum bicolor
  misc_feature (1)..(379): Public GI no. 1076760
  misc_feature (1)..(379): Functional Homolog of  Ceres CDNA ID no. 23704869 at SEQ ID NO. 221 with e-value of 3.39E-28 and percent identity of 50.9
MEPVFSMEEILGPFWDLPSPPPPEQQPLVIGTSSVVIDGVVTHGGNGEGSNMMDQIQNTTEDPFERLLEEELLTDTTPVANSSCPALNVDPVVEVDQGAMAPEAVSAVGDPMEYNAILKRNVEEDLMAFKMWRASTSGVNSEGSNNENGGDLHVRLTTSSSSRDPSPSDEDMDGEVEILGFKMPTEERVRKRKESNRESARRSRYRKAAHLKDLEDQVDKLKAENSCLSRRLAALNQKYNHATVDNRVLKADMETLRAKVKMGEDSLKRIIEMTSLTSIPIPELPSSSDVPVHIQDNIVNYFTTTPAGDALADHSFMPMPDPLPLQLQAEEPTINGALNARDEPNRYALRGREPTINAAYPGDNGSHDADLLRINSPGI

SEQ ID NO: 234 - protein, 391 aa, Hordeum vulgare subsp. vulgare
  misc_feature (1)..(391): Public GI no. 1869928
  misc_feature (1)..(391): Functional Homolog of  Ceres CDNA ID no. 23704869 at SEQ ID NO. 221 with e-value of 4.89E-52 and percent identity of 50.7
MERVFSVEEIPDPFWGQPSPRQRGRRPPEGAMNRCPSEWYFQKFLEEAVLDSPAADPSPMSGASGRGQAACRPRGVAGTATGPAVDPVEYNAMLKQKLEKDLAAVAMWRASGAMPPERFAASPSCPNADGQHIGTINPIGGNVVPLQNKLAGGASGVSGPHLVQNADALVKQAASSSSREQSEDDDMEGEDEITGNGVPTDQRLRRRKQSNRESARRSRSRKAAHLNELEAQVSQLRVENSSLLRRLADVNQKYNGAAVDNRVLKADVETLRAKVKMAEDSVKRVTGMSALFPAGSDMSSLSMPFTGSPSEATSDAAFPDDLSAYFSTSEAGGNNGYMPEMASSAQEDDNFLNETMDTSKMGRPDSLHRVASLEHLQKRMCGGPASSGSTS

SEQ ID NO: 235 - protein, 408 aa, Coix lacryma-jobi
  misc_feature (1)..(408): Public GI no. 463212
  misc_feature (1)..(408): Functional Homolog of  Ceres CDNA ID no. 23704869 at SEQ ID NO. 221 with e-value of 2.50E-32 and percent identity of 47.5
MEHVISMEEILGPFWDLPPSPPPLPLPEQQPLVTDTGSVVIDGVVTQGGGDGEGGDMMGQNTTEWTFERLLEEEILINKTTLVTNSSCSTLNIDPVVEVDQGTMASGAVSAVGDPMEYNAILKRKLEVDLVAFKMWRASSVVNSERSQDSNNHNGGSKNVVQNKLNGEDPINNHAQNVDLRVRLATSSSSRDPSPSDEDMDGEVEILGFKMPTEERVRKRKESNRESARRSRYRKAAHLKELEDQVEQLKAENSCLLRRLAALNQKYNEANVDNRVLRADMETLRAKVKMGEDSLKRVMEMSSLPPSMPIPALPSSSDASVPIQDDIINYFSTTPAADEDAPVDNNSFIIMPMADPLQLVQAEDQPTMGAMELIQKTMGAMPTSPGSALQESQLLGLGPDETINMDMY

SEQ ID NO: 236 - protein, 426 aa, Pennisetum glaucum
  misc_feature (1)..(426): Public GI no. 21435101
  misc_feature (1)..(426): Functional Homolog of  Ceres CDNA ID no. 23704869 at SEQ ID NO. 221 with e-value of 3.00E-32 and percent identity of 43.5
MDDHANSMEEIIIPDPFWEDLPPPPEPPLVVSDGFTDGVVTNGGGEGTGATDQNQSPSEWSFERLLEEELLIDATPLENFSGSAPHADTTVVDEVDRATTMVPAAVSTVGDPMEYNNILKRKLDEDLATVAMWRASSVVHLEHSQDSNNHIGGDKNFVQNMLSISDSPIKRVRNTYSRARLASSSSSRDPSPSDDDDMDGEVEILGFNMPTEEKMRKRKESNRESARRSRYRKAAHLKEMEDQVAQLKVENSSLLRRLATLNQKYTDATVDNRVLKANMETLRTKVNMAEDALKRITGTMSSSQPLSRPSPLVPAAANADASGHILDNIIIDYLMNSTDATIDHSFELRTTAPPAPAFSQAETPAVGTNSAMISRMAAHHAVAVELLHKRLGGGAMPPATTFSGVAPPETAALPSDVVESTDMGIH

SEQ ID NO: 237 - DNA, 976 bp, Arabidopsis thaliana
  misc_feature (1)..(976): Ceres Promoter AtSS3
aaggtctgtttacagttattttaaccataataatatcccctcaaatgtcctgcttgttacgtgggtgacacaattgttcggtgattccttgaataggctactactacttattgtttcatattttcgaagagattatctctagttcttaaggctttggttttctttgttttcaccctttgttttacttcataaagacgaaaaacaagaaaaattaagtatctatactaaaaaaaaatatgatctataattcgatatgtacacacgtttatacattgacttttatacaacacgttagtagatagaaccgtcattcttatagtatcaatatataaactataaagtaagatactagaatgcggccgatttatataggtacatccattttgaccattttaatgtcataagatctcgaaggtgtgaaatgtgaatggtggtgattaaaaaaacaagagtgtgcggtgtcgtacggtgagacggtttattttgcactatcatcatatgtgattttcgtgcacgctttagagaaaaaaaaattccacaatccacactatacatatatagaccataataatattttatgcatggtacaaaatgcagaagcaatgcaaatcaaattgctttccatttccgctaccgcatttactagtgaatcaagaaaagtaaatgtcaaaacatttaatgaaatgttcctaagataatgtgtagtatcttttcatcaatctacttctaattaatcttaaaactaacgtaatttaggcgtatttgtttcttgatttatattcaatattaattactaattttagtttgatttgtttctataaatactttgtctattgtcaactttagaaaaaaaaaaaaaaaaagatgtcttaatataaggaaatttcaaaaaaggtaacattccaaaaataaatctataaatatacatacatacatacagataagagatagataaaaagaacacaaccaaagaaac

SEQ ID NO: 238 - DNA, 971 bp, Arabidopsis thaliana
  misc_feature (1)..(971): Ceres Promoter AtBBE2
ggttcgtcaatattgtcgaggtaataaagcgtagggtataatgtatgtgtagattttttgattgcctagtcaaagggtaaccggttaacaaggaagattattagttactacaattctaggacaggagagaatgtatttaggcttcacgccacaactactgaagatagtggtgtcgctatctttagatgtgataaacataaagtcgtgtcggtatccttgaaaagttgaaattagtgcgtattagcattgtttatccctaaaggcacatatatattgttccttactttcaaacgacatatatttcttcagaaccttttgctataatatgtctgaataatcattacaatatagtatatacacacaaaacttattgatactatgcattctctttggctatgttggaaaattcacttgcatgacttgtataaacttctaagttatgcatgcgttttaaataatcaagttactactataaattaagatacaggtatgtatagcaattaattaaaaactaattaatacagtttagtaatgaataatgatataaacattatacagtacagtgtcgctgtttcagtaatgatataatattcacatcagatttacatgtaaagattcagatcatagcaaattagcaatgaagtaaaggacaatgcaagaaattgaccaaattacttgaatattctaataattcatttcttttctttttttggttggcgaaacatatatatttggttacgttatatgcttaagggatatactgcttatttttcaagtaatcaaaatataaagatagaattatagtaaggagataaaagttgagattttagtaatagaataaaaatagtaatgaagtaatatttacaccaactttacgtgtaagccatccccacacacacatcaacctcctatataaacctaaacacatacctcaaacaaccaaaagcaaaaacctcatcgacataaaaaga

SEQ ID NO: 239 - DNA, 999 bp, Arabidopsis thaliana
  misc_feature (1)..(999): Ceres Promoter AtROX7
aactaattaggtcgttaattgtccaagggtttttcatagttgatatagttctgttcaaatatagccatccttaatcgattcatgggatcgtaaattactacttcgagtgttgtaaaaaaaaatgaaacttctacattacaaactcgaatttaatgcatctggagtgatactataaaagtagggatgctctcaggtcgcatttgagagacacagaaatgattttaatggaattaatatattttcagtttttcacaaaaaaaaattgtgtttataacaactgcagattcaatgctgattttatgagtctcacctatagaatttatatttctatattcatagaggcagtataggtgttgacccaacatcgaaagaacacttcgtaaaaaattctttggaacaaggctgaaaatttactcccaaatttagctatccgatgaagataaatcatttaccgtttattaaagaattatcgagattttagtccaaaccaaaagagattatgagcctaagattttgaatttgtattggtaaaagaaattgaacgaaaatttcagaaaaaaatattaataaattgaacgatagagttcacttactacatagtcaactagtgcctagctataatagtttcaaaagacaaaaaaaaacaaaatcggttaactacttccgtgacataattctcattttgatttttgaatccagtctaatttgaaaagtatattcaaaatctttaaatccattaatgataacttttataatacgttgacacacgcaattgtatatacaatattcttgaattttaaatgtaaattctagaatatattgcgatcaccacactaatcaaaatctttgggacaacttgaacccacatttgacttttcttggtcaaatattttggcatcatgcatgatcttctctataaaaaccaaaaggcctcaacgacattcataaactcagtcattatatttatttttgttgtatttcaacgttcaatctctgaaa

SEQ ID NO: 240 - DNA, 450 bp, Arabidopsis thaliana
  misc_feature (1)..(450): Ceres Promoter AtCR2
tttgttttatgaagctaaaatgcttagctcacttggctccatttttccacacgggtgttaatgctcatacgtgacatgcttttgagaaaaagctgaaaacaacttatattaattcattattgatttacatattaaaattttgaaattttagcacaaattacataacatattattctttaaaagttttccaaataaacaatattaaagaatactaattcaaatatttttcgtatataatatcatgactactttctattaacaatttatagtcaaattatatagcgttataaacttataatatgaagacttacgtacttttctaatcaaagagagtatattaatataatattatcaggcactagcattagtcagtggctactgagtaaagctttgggccaccgagagaaaccattttctgagagcacactttcgttgacttctctttaacca

SEQ ID NO: 241 - DNA, 1000 bp, Arabidopsis thaliana
  misc_feature (1)..(1000): Ceres Promoter AtROX6
agctatacatcctccttgcatttattatagtgcctagatttttttttttttttttttgacattcagtgcctagaattttggtttatgtagatagaaaagtgacactcgacgcaaattcgaaagaatgccaccgaaaaaaatggaacgaatgatgtttcgctatgttggatgcttcagatcccatataacaacactactctcaaaattcataaactctcaaaacatattaatttagtagcatcacgaaaatacatgttgttctcaaatcattacaataacttctactcttattagctgaaaagtataaccttatgtttttgtaaaaagattgctaaacgttatatttgtatatcttttcagtttgttaatgtcattagaacgaagtgtaaaatcgcttcaagatttgttattctaaatgtattttagaacaaatattctgaacattaaattattttcaacaaaatttattttgaataacaaataacttgtcatggtcgtaactcttttttttcattctctagattgaatcaaaaataattttgttttgtagtataaaacatttttggtcttttattcaccgttttatagaacattaatatctcaagttctaatatgaaaacaaaaataactgatccctcaaaaaaaaggaagataaaggttgaaagacatgttattctcttcccaaaacaacctaatccaatacctctaaaaatttatctttctcacaatgccttcaaacaaattgtgttctttctatagttaacttgactatattaaaatctctaaagttaacttgacttctgaaacttgtgatctttctatagttaacttgactatattaaaatcttgagcaattaaaccattaaaaaaaaaaaaaacaggagaaaccttgaccaatacaacaaatcctaaaaatggccaacgataagaatcacaacagaaatttaaagactacatgtaactatttatactacagaaaacaccaaatagaatccaatca

SEQ ID NO: 242 - DNA, 530 bp, Catharanthus roseus
  misc_feature (1)..(530): Ceres Promoter CrSS
gatctttattgtttgtattttcataattaattaatccctacaactgatttcaaaaaaaaatctatttgaaaaaaataattctgctactaaaaattttaaaatcttcctataatatcattttacgagtttaatttatttattatcatattaaaacaataatattattcattacagaaattggacaaacaaaaagatctagcaaaagtattatgattttaatatatagtcgaaaatacgaattagacaagcgaaacattttgtaattaaatcgctatttatcatataattattttacaataattagtattaggaattataattattaattgatgtataaaccgataaaaatatatttatgatatatacaaaataaaggaataaaagaatgcataagtatattggataagcctataaatattactccacgtggtacatcactcttagaccgccttctttgaaagtgatttcccttggaccttgtttggtgagtttgtgggcttattatattccttcactgtccctctaagtat

SEQ ID NO: 243 - DNA, 1001 bp, Arabidopsis thaliana
  misc_feature (1)..(1001): Ceres Promoter AtSS1
agcaaccaatatgtacgtccatctttatatttattgaaaaataatgatatattgggaggtcaaaaatcggataagcttatgattctttttgtgcatttgcattttatttacccaacatatggaccataatattatatcttctgtttattatggtctatatgctagaatgtaataatacatcggaattttgaaagactagaaacattgctttgaaatcctgtgtattttgcacccaaaaaaaaataaaaaaaattgtgtgtttatatacgcaatttattcttaaccacatagtagttgtaaattgtaaacgcaaacagtaaacataaaacattccatattattgacgttttacgtttgtgtttacaatttgcaattgatgtttgatgataaacgcatcgatcgtcaatatttgatcaacaagactaagatcattgaatgcgactatgcgaccggttgatttattaacagtatccatttggtcctttcaatatcacaaaaatcttaaatttccttttttttttaatatccaagcaaatattctagggtatttctcaaaagtatatgtattttatttatttgtaatcaactgctccttggaattacacttgtatatattttctgatatctaaatacctacttctactttatcaaaaaaaagtttacctacttctaatcaatcttagacacaagtacataaatttttagaccatgcgtttgcgatcttgcgttgacagtcgtacgtctaccccaaaaatcagcaatgtacgtggattgcaactatttgactttttgttccatgtgcaacttaatctgtcaagaaaccccgagaaacaactctaatctcttcactaataaaataatccgacgagcataacgtgtgccatcaacttaatttacaaaataagaaaccttcttaaaaattaatcaaaaaagaaaaagaaaagttaaataatcaaacctataaatattcgtaacgactacaaagtacaagaaagtctcat

SEQ ID NO: 244 - DNA, 1039 bp, Eschscholzia californica
  misc_feature (1)..(1039): Ceres Promoter EcBBE
atctaacatgtacatagaccctagtatccttccataattttatgattgattgattctatcctctcattaagtctatataaggctaatactggtttcccattctgttggctactatcaaaatgacctaattagcaaagacaatttatctagttgactactatactaacaatggaactccctaaccaaagaaagagaagatatgggtgggtggggggagagtgacattcttctctaggttttcaattcctcccttgatcttaattttcctttctttcttttattgttttagattttcattatcacaagtaatcaacttgagttttcaacaaaaaaaaataatcaacttgagtataaaatttaatataaaatattagattttaattaataatcaactacaaaatttgagcgggacaaataaaaatcacgtgatttttttttataaaaggcaattaaacgttgtctgtaatcatgtaagaaagattctgactgaatgtataaaaaaattaatagttaagacgtggaaagaaccaaaaaccgtagtatatagtaattaattattttataaggtccaaattattattattagtcaatctaaccaggctgtattactattactaaatctattaatttatgaaaaattagctcgtaatctctttcttcccaaatttactcccacgcacacctcgtggtaggtcatcgtgcgtctcttatctattaactcatttgtttttaaatccctaagtcacctttataatcctgattttctaatccaacggtgcgtaattctctaacttgatcttgaagtccgcatctcattcttagaaccactgattgaaatatttgggatttgtttcgggatttgaccggtctcaataatagatttgtggacagacagccgccaatctggacagtatcttacacgtgtgagatgactgtaggatatgtggggtccatagaattagttgaccaaatcaaagttagttgacttaaaattcacagtataaataggattgacaatcataactggcattctcgtagt

SEQ ID NO: 245 - DNA, 850 bp, Eschscholzia californica
  misc_feature (1)..(850): Ceres Promoter EcNMCH3
taacttaatttttcattagttcatggcagctagctagctaggctcctgttttcttatcttcatcaagaggtggtgatatactatgtgtatcttgactgtgatatacaaattaaccatgagacacaagttaggtgggtaggtggacatgagctataggtggctaataaggcaagaaagggagatattttcttcgatcaccaagggcgtaggtggctgggtcatgagctatagttggtttttgataattcttcaatacgtgtggtccatgacattccttaggcaggatgatttggttggaaaactggctataacgctgccggtctttagtctaatgaacgtggcatgaaggatggttagtattgtggttagctcaattcagactcttttcactacatacgattgagaatggttggactttgtttggttttctcactcgctacgtctcagttgatgggtctaaggcctctttcttttcgttttagactaataaagttatctttatcgcgttctcattgtagattatgtaccaatgattatctttttctttctctctcttttgattatgtggtcttttgattatttgtctctctttaagatgagacaaataattgtagccccttttttttctgcataaatgcaatttgtcttgctaccatttttcgaatggaactttaagatgagacaaataattattgagtggtatgagtctatatgatgttgacttcatcatggaccactccatacccccaaaaactaacactatgatctaaagctatattaaaacggtttggttttgtggttagactaccagttcatcctctctatctcctcccaagaatatcaggtagct

SEQ ID NO: 246 - DNA, 610 bp, Papaver somniferum
  misc_feature (1)..(610): Ceres Promoter PsROMT
ttaagtgtttttagttttgttacaagtttggtgaatgatctttgatgatattttttttttgaagtagtgaacgaagtaatgttctacttcccataggatttgctctaacgattaactatgtttgtcccaaagggttgtatgacttacatacacaatattaaaagattcgaggataaggatatgtttattaaccaactcctcaaaacatttagacctggatcaatcagttcgattcttctcagacaattacgacatgtatgaatcgatggatacatttgaaacatatatccttacccgtgccgttacggcatgggttgagacctagtgattacatataaaacaactaattataccaatgacttgagttcgaaactcgtcccatgatcaattttttatcaatcaaaagaaatttatacgaaaggaaactatatgattgccatgactcgtaaatatacacaagcaatatggaggtcctattaactccaatcaaaccacaatagataaatatatcgtgaatcatgtgtggccaatatatacccacacttctatatataagtgcatccacttctctttgttttccaaaacaaaacataaacacaatttattcaga

SEQ ID NO: 247 - DNA, 575 bp, Papaver somniferum
  misc_feature (1)..(575): Ceres Promoter PsHMCOMT2
agcacagaaaaaagcccttgctctttcatgtagcatattattaattaagcttgtcaattttcagtcttatgttttgaagcatattggctgagatttttattatgtgcttgactgggttttccaggaaattaccactggcaggtcaatcaagaatttttctcagaacttaaacttccggcccggcagatgcaagaaaacacatataccacttgcatgaaaccagatatagcatgggctgacctttctcagaattattcccacgagcttcttgcttttctctcgtgggctgatgatatatgtgacactcctcaacagcaaccgccactgtcaacaactttagtactataccaacttataatgatttcttagttaggtcatggtgggggacttattcttttcttttttttttgttgaatattcatatctgcatcctttaatgcacacaaacggtccggcaggcttagctgcatgcacttataaatacaccataaattttgaagagatttcaaaacacccacacataacccaaagccaaagcaaaaaactgtcttctcttcttgacaattatatacagc

SEQ ID NO: 248 - DNA, 373 bp, Papaver somniferum
  misc_feature (1)..(373): Ceres Promoter PsSAT
ttgtcgagagagatgaattacaaaacaaaatagaaagcatcagcatattacattattacatcgatcctttataaaagataatatatacatacatatatatatatatatatataacctttggtcttcaactgctattgaattacaaaacaaaatagaaagcatcagcatattacatcgatcctttattcggaaagaggggtattctgttcggtgagagtttcttcttatccagctcctcgcaaatgaaatgattccataatacctctctaaaagacttggtcattatataagagagggagaccacgagcttcttctaaacaacagaaagtatcatctaccattatcaatcctgttaaacagttaaacactttgg

SEQ ID NO: 249 - DNA, 971 bp, Arabidopsis thaliana
  misc_feature (1)..(971): Ceres Promoter AtWDC
gaaggcttgtactgttccaaccgtccattactttttttgagaaaatttgttgagagggcaattttcaagtttgtaaatttgccacttcaataacttctttgatttgatttgtcaattaggtagttcttacttcttactacattgatgtcatgcactttcatttagctgtcattttagagaagaaattacaaaaacgttattattttaactaactacttatgtggaatactatctcatttcgggggtacattgttttaacggtggcgataaaaagtgttttgtaacagtgaatagagaataatatactgttgacacatgatagtgtaaaagtgaacattatataacgaacaagtgtgtggtaaatactatcaccagggtaaagtaaagacattgttgtattaatgtgacccatgctgacgaaaatatgtatgtctgtgactcataatgacaaaaattattaatcatacatcatgtcatcactttgccttaatttgttggttaatatagagcatatgttggctaataaaaagaagaagaagaaactatcaaaataaaaattacgagaacgttacaaaagtaaaaaaattagatgcatacatgtgttaaatgttttataaagtttaatttgtgtggagtatatcatttttgaacaaataaccataaatagaaaaacaagaaaatactcaattcttaagtcaaaaatagtattaccaaagtcaaaaatagatgtacgcatgtgttcttcgagtatctcaattctttcgaaggtattatatattttatatttatgctaaaattttacagcttctatgatagagagtgacttattatactatataaacgctagaccattgagtgatgcaaatcacaaagcttctttaataacacacatacagattctttcaacagctgccactacctttcgaaatgtaagcatctcctctaatctccatcatttttcagaatgtgtt

SEQ ID NO: 250 - DNA, 500 bp, Arabidopsis thaliana
  misc_feature (1)..(500): Ceres Promoter AtSLS6
gatggcaatggcgttgattctacagagattctccttcgagctttctccttcctatgttcatgcgcctcaaatagtcgtcaccattcacccacagttcggtgcacatcttatcctgcgcaagctgtaattctagaatcccatgtgctcttgtcagataaacagaggaaaataaaccagatcatagtataaaactcaaatctttttattaattgaattcagaactttgtgctcacatatgtcttgacaaaccaaaatatttccaagaaaaagagtgaaacgcatggaccaatatatgtcttcctattttcgtcgcttttcacacgaagtccaaatttgcttcttgcgccttggtggcacgactgtgagggtccaagtaaagcaaaaattaattagtcattacaaaataattgcccaaaatatcaaaatataaagtatttaagacatcaggggtgatgtcatcaccacatccatatcttctccgaaattctaaacatttatac

SEQ ID NO: 251 - DNA, 1006 bp, Arabidopsis thaliana
  misc_feature (1)..(1006): Ceres Promoter AtBBE5
tcctggagctaccattggcatttaataattgtttttgataattagaaagaaaatctttgaattaaatatttaacaatcttcccaaaatctctccatattaactacacgattagttacttaaataaagcttccaaaatatttaatatcatttaattactacaaaattatcatttttgatattgtttttctacatgactataacaattcgattataatcatcaattgtaactttaaaaaacttttatatataaacttttatatgtagtaactttaaaaaataaattgtccccgcggtataccgcgtgttaaaatctagttatatttaaaagttaaaactaacaaaaacgaaagtgtacttgatagaaacatagcttatatggcctaaatgtggtattaagtcttccaaagcaaaccatgaatagtttaagttttctagtgatgtaatgcatataattttatggattttagatagtgttgttttgagaaccatagtgttatttatatagagattaattcttaatttggcccttaatcaaattagaagttattaagtatatccagatatttacttttcattatatttatgtctcatgtcatttacttcatatatcaattgagtacataaacttagattaatcaaacaataaccataacatactgattaataccccaattaagttttagagaagtaactttgaattcatatgactctttttaacttaattttggacaactgaatgtgcattattttgtcgctttacaaacccgtggaaaatgttggtcacgttgctatcatttcacctaatcgtttcgtttgacaaatcaaaccatctttgaatttagagaaaaattcaatggaccttattttatcagaatcgctatatatttattaaaaaaaatggaaactcatttcttcttttacaagaaagaacaatatacaacatttccatcttgaagccttattgtgtgtttagcttctctcttgcatataatattcgctgctagg

SEQ ID NO: 252 - DNA, 1003 bp, Papaver somniferum
  misc_feature (1)..(1003): Ceres Promoter PsBBE
gttcctataaatgtggcttacagaagtcttgactgatgacaccaatgacaatcccgagaagttatctaaatgatctcgactgcaatcaagagcaaattttgaataccacagtaaaattaagtagaagaaatagaaaaaatagagcccgagaaccttactgatttggacaatattgtggttctatctttccgatttgttatttcatagcttttttattatgttattcaacttgatggatcttttttctcatatagtggaaagctaaattacacacaggagcatgaccgactgcttaccagtttgatgtccactcccaaaaaatctcgacttcgaacccaccacaaaatatccatccctaataacggtcgacaataaaggtttaacatcatgtctccttaatccattgccacagtaaaatcttttttacaacatttattttctgaaagaaaacatttacacagtgagcacttcaacaaatgacaccctagagagagtgccaaaaggcataaaactagagatccgcggagggctgtggagtgcgaacaagacatctcgacacttcattatctgtcaaaatatgatgattagctaccacaagatacccaaatcaaggataaaaacgagtaaataaatatcatattcgtttcatgaaaagaaatattatcactattttattttaatttaaaaatatgtaaattggaaaaatgatagccactttttttacggaaacagagggaacataatccgaatctaagtgttagtttgtctatctccatctttgatgaccattgaaatgcaatgtccaatcctaacgaaactggaatggcccgtgacatgtagcacagctgcacagcagccatttgagaaagtcagacgcgtttactcccacgtgcatcgcgtttacatctaataaaatgttagagttgcacgtgcctgcgggttattaaaaccagcactatattttgagcaccatttctttctatttttgacgtacttctccaac

SEQ ID NO: 253 - DNA, 1823 bp, Arabidopsis thaliana
  misc_feature (1)..(1823): Ceres Promoter 21876
gtctcttaaaaaggatgaacaaacacgaaactggtggattatacaaatgtcgccttatacatatatcggttattggccaaaagagctattttaccttatggataatggtgctactatggttggagttggaggtgtagttcaggcttcaccttctggtttaagccctccaatgggtaatggtaaatttccggcaaaaggtcctttgagatcagccatgttttccaatgttgaggtcttatattccaagtatgagaaaggtaaaataaatgcgtttcctatagtggagttgctagatagtagtagatgttatgggctacgaattggtaagagagttcgattttggactagtccactcggatactttttcaattatggtggtcctggaggaatctcttgtggagtttgatatttgcgagtataatctttgaacttgtgtagattgtacccaaaaccgaaaacatatcctatataaatttcattatgagagtaaaattgtttgttttatgtatcatttctcaactgtgattgagttgactattgaaaacatatcttagataagtttcgttatgagagttaatgatgattgatgacatacacactcctttatgatggtgattcaacgttttggagaaaatttatttataatctctcataaattctccgttattagttgaataaaatcttaaatgtctcctttaaccatagcaaaccaacttaaaaatttagattttaaagttaagatggatattgtgattcaacgattaattatcgtaatgcatattgattatgtaaaataaaatctaactaccggaatttattcaataactccattgtgtgactgcatttaaatatatgttttatgtcccattaattaggctgtaatttcgatttatcaatttatatactagtattaatttaattccatagatttatcaaagccaactcatgacggctagggttttccgtcaccttttcgatcatcaagagagtttttttataaaaaaatttatacaattatacaatttcttaaccaaacaacacataattataagctatttaacatttcaaattgaaaaaaaaaatgtatgagaattttgtggatccatttttgtaattctttgttgggtaaattcacaaccaaaaaaatagaaaggcccaaaacgcgtaagggcaaattagtaaaagtagaaccacaaagagaaagcgaaaaccctagacacctcgtagctataagtaccctcgagtcgaccaggattagggtgcgctctcatatttctcacattttcgtagccgcaagactcctttcagattcttacttgcaggttagatattttctctctttagtgtctccgatcttcatcttcttatgattattgtagctgtttagggtttagattcttagttttagctctatattgactgtgattatcgcttattctttgctgttgttatactgcttttgattctctagctttagatccgtttactcgtcgatcaatattgttcctattgagtctgatgtataatcctctgattaattgatagcgtttagttttgatatcgtcttcgcatgttttttatcatgtcgatctgtatctgctctggttatagttgattctgatgtatttggttggtgatgttccttagatttgatatacctgttgtctcgtggtttgatatgatagctcaactggtgatatgtggttttgtttcagtggatctgtgtttgattatattgttgacgttttggttgttgtatggttgatggttgatgtatttttgttgattctgatgtttcgatttttgtttttgttttgacagct

SEQ ID NO: 254 - DNA, 1000 bp, Arabidopsis thaliana
  misc_feature (1)..(1000): Ceres Promoter PT0668
atagagttttactatgcttttggaatctttcttctaatgtgccaactacagagaaatacatgtattaccactaggaatcggaccatatcatagatatcaggattagataactagttctcgtcgctatcacttcgcattaagttctagtaattgttaaagattctaattttttactaaacaaaaactaaatcaacatcaaatatgcaaagtgtgtgttgtccacacaagtgactcaaagtatacgcaggtgggattggaccatattattgcaaatcgtttccgaaccactcatatttctttttttctctcctttttttatccggagaattatggaaccacttcatttcaacttcaaaactaattttttggttcagtgatcaaatacaaaaaaaaaaaaaaagttatagatattaaatagaaaactattccaatcttaaaaatacaaatgaaaccataattttaatttatacaaaactatttaattagctaagggttgtcttaacgtttagaaaataaaaaattatgattgtctgtttaaaattacaatgaatgaataaaaaaaatatgcaatgaatgaaagaataaattttgtacatccgatagaatgagaaaatgaattttgtacaaaccactcaagaattcaaaacaattgtcaaagttttcttctcagccgtgtgtcctcctctcctagccgccacatctcacacactaatgctaaccacgcgatgtaaccgtaagcgctgagtttttgcatttcagatttcacttccaccaaacaaaactcgccacgtcatcaatacgaatcattccgtataaacgtctagattctttacagcctacaatgttctcttctttggtcggccattatttaacgctttgaacctaaatctagcccagccaacgaagaagacgaagcaaatccaaaccaaagttctccattttcgtagcttctttaagctttttcagtatcatagagacacttttttttttttgattagaa

SEQ ID NO: 255 - DNA, 1000 bp, Arabidopsis thaliana
  misc_feature (1)..(1000): Ceres Promoter PT0535
ttagtgaaattatgacattaagtaaggttttcttagttagctaatgtatggctattcaattgttatgttaggctattttagttagtatatgaatttaggcagtctatgcaaatgatttcgttttcattttttcatatgtaaacatcaagatcaagtaacgccattcgagttgatattttttttttaaattagtgtgtgtaaattttggaccgcttatttgagtttgctaatgaagttgcatatatattacgttaaaccataggcaaactaatttgaaacatccgattcgatttcctgtaatttttcttggttaattgaccaaaatcaagatcttcagaaataaaataaaagacgaaagaaagctgtcgcaaagcagattgtgttaaaaaaaagtggattgggctcaaacgcaacttgtccagcccgtgacaattaccctatacgcaagtaagagtaacgtatcactggcaaaagttggtattagttacgatatctttgtcatgggggcatgcatgggcatggcttaagagttaagccttaagaagagtcccacactcgtgactctcatgatcacttgttgtttcttacgggcaaatacatttaactttattcttcatttattcacctatattcttttggataataacttttctctatataaaataacaaacatcgtacgtttcatttatttacaacaagcgatgagaattaaaaggagaccttaattgatgatactcttcttttctctcggttacaacgggattattacagataatgataatctatatggatgctgacgtggaaaaacaaaatttggtgaaacacgtcaattaagcacgacttttccatggctagtggctaagatcgtttcatcacatggctatatcatataatacttggatgaattcaaaataaacgactgagaaaatgtccacgtcacggcgcaccgctttggacttaagtctcctataataaatacaacaccaaacattgcattcca

SEQ ID NO: 256 - DNA, 999 bp, Arabidopsis thaliana
  misc_feature (1)..(999): Ceres Promoter PT0585
tgaagtcatttaatatgagtttgacattaggtaaacctaatctatgagattatagaatgtagcaaaactatcaatgtttcttttccaaaatattttgtggtttttctttttggttcattatgttttgttatttgtgaattattttaatatgaagtaattatattgattttatatgatatacatattattttgatataaaatttaacacttatccattaaaatagcatgggcataatcaaaatcgggactattacgatgaaaaagatagttaaattgtatgataaaataaaatgtgtaagattaaaattttgggttttagaaaattactaaacaaaatatagacaaagtatgttgactattatttaaaatttaaatatcatcaataagatatagttaaagtcattaagtgtatagcaaaatgaaaattctaagattaaaattcgattaaaattttttttactaaattaaatatttaaaaatagggattatcatttactatttacaattctaatatcatgggtaaaaattgataactttttttaaacccgcctatctaggtgggcctaacctagtttactaattactatatgattaacttattaccacttttacttcttcttttttggtcaaattactttattgttttttataaagtcaaattactctttgcattgtaaataatagtagtaactaaaatcttaaaacaaaatattcaacctttcccattattggaatggtaatgtcttcaacaccattgaccaacgttaaggaatgtcttttaatatttttggaacctaaatgctaatactgtataccacaatcacttatgagtattgaagttgagatagaggaggtacaaggagaccttatctgcagaagacaaaaagccatttttagcaaaactaaagaaagaaaaaagattgaaacacaaatatgcgccactcgtagtccacccctatctctttggcaaaagccacttcactctttttccctttttat

SEQ ID NO: 257 - DNA, 1000 bp, Arabidopsis thaliana
  misc_feature (1)..(1000): Ceres Promoter PT0613
ttaatactaacattgtagaaagccacaaaaaagaaattgaaatgtgagtagatgctgagtcagaggtttggtcaatacacaacagctaattgagataatattatacacgtcacgatgacttgttttttctcctcccaacttgttaatttctttattcttaaaattaaaccatcgcaaaaacagaagaacacagctgtttttctcgactcccaatttctattttgctgctaaggacatttcatttcattatttcccaattcaggactccttagattttcctaaatttgttttcctaacttgctctctctcattctaacattttctcatttttttagattatcttgtactttttagtagattattttatcaggttttacaaacatacattgacattctaaaaagggcttctaaaaattcagtgtggaatgctgatatactaaaaaaaggtcatgcaaaattatctacgatttatctaaaattagataatttgccatatataactattaactaataatcgatcctttgattttttgtttagataaaacgaaacagctatatcttttttttttgttatcggattttaatcgaataaaagctgaaaaataacagttatatcttcttcttttttaactaatgaaacagttatatcttaaacaaacaacagaaacagtaaaatattaatgcaaatccgcgtcaagagataaattttaacaaactaataacaattgagataagattagcgcaaaagaaactctaattttagagcgtgtaaacacaaacacgtcttgaaagtaaacgtgaattacacgcttctaaaacgagcgtgagttttggttataacgaagatacggtgaagtgtgacacctttctacgttaatttcagtttgaggacacaactcaagttatgtttgatatctaaggacttgcactgtctccaaatctgcaggaaggactttttgattggatcaatataaataccatctccattctcgtctccttc

SEQ ID NO: 258 - DNA, 351 bp, Arabidopsis thaliana
  misc_feature (1)..(351): Ceres Promoter PT0625
gatcatgatcagtttcaactcgctgtgcccacgtgtcgagagatcggcacgtgcctgagctctcagccgctcataaatacacttgtttagtagcaacagtatactatagtagtcctctcctgtttggcttttagcttgcatcgatggatggatggatggatcgcatgagagggcttcgcgaaggtacggaaccttacacaacgcgtgtcctttctacgtggccatcgtgtaggcgtctcgccatgctacgtgtcccggaggatgtctcgatgccaacccttataaatactgttccattccaatcccatcgccacagccagtgcaaatctgatcgatcaagataatcgagca

SEQ ID NO: 259 - DNA, 1022 bp, Arabidopsis thaliana
  misc_feature (1)..(1022): Ceres Promoter PT0633
cccgatcggccttaatctgagtcctaaaaactgttatacttaacagttaacgcatgatttgatggaggagccatagatgcaattcaatcaaactgaaatttctgcaagaatctcaaacacggagatctcaaagtttgaaagaaaatttatttcttcgactcaaaacaaacttacgaaatttaggtagaacttatatacattatattgtaattttttgtaacaaaatgtttttattattattatagaattttactggttaaattaaaaatgaatagaaaaggtgaattaagaggagagaggaggtaaacattttcttctattttttcatattttcaggataaattattgtaaaagtttacaagatttccatttgactagtgtaaatgaggaatattctctagtaagatcattatttcatctacttcttttatcttctaccagtagaggaataaacaatatttagctcctttgtaaatacaaattaattttcgttcttgacatcattcaattttaattttacgtataaaataaaagatcatacctattagaacgattaaggagaaatacaattcgaatgagaaggatgtgccgtttgttataataaacagccacacgacgtaaacgtaaaatgaccacatgatgggccaatagacatggaccgactactaataatagtaagttacattttaggatggaataaatatcataccgacatcagtttgaaagaaaagggaaaaaaagaaaaaataaataaaagatatactaccgacatgagttccaaaaagcaaaaaaaaagatcaagccgacacagacacgcgtagagagcaaaatgactttgacgtcacaccacgaaaacagacgcttcatacgtgtccctttatctctctcagtctctctataaacttagtgagaccctcctctgttttactcacaaatatgcaaactagaaaacaatcatcaggaataaagggtttgattacttctattggaaagaaaaaaatctttggaaaaggcctgcaggg

SEQ ID NO: 260 - DNA, 1000 bp, Arabidopsis thaliana
  misc_feature (1)..(1000): Ceres Promoter PT0650
catacttaattctaaaaaaacaacacttatagtttataagcagctcttatgataaaaatctttctgagttatagctctgttaaacttgtattcaccccaaaaacggatgtttcatttcttattttttacttggagtattttattgtaatttgtaaaaaaaaatgtaaagtgggggatatcatgaaaaacaacgtcactttgtttggtcacaatatacatttgataaaataatggtcgtcgcgtgatttagttgatttttgttttatcaaccacgtgtttcacttgatgagtagtttatatagttaacatgattcggccacttcagatttgggtttgcccacatatgacataccgacatagaaggttaaatccacgtgggaaatgccaatattcaatgtttggttttcaaaagagaatcatttctttatatgatctcaaaagtatggaattgaaatgactaatgagcacatgcaattggtgctatcttaaaaaccgaacgtctttgaatttaatttgtttttcaccaaaggtacctaatgaaaccctttcattaaaaaataaaggtaacaaacaaaattttgtattggaaaaaacattttttggaatatataatttggtaatagaattatgagcaaaaaagaaaaagaaaagaaagaataatgagcataataaagcctttacagtattactaattgggccgagcagttttgggctcttgatcatgtctagtaatcttaaacagacgataaagttaactgcaatttagttggttcaggtgagctaccaaatccaaaaatacgcagattaggttcaccgtaccggaacaaaccggatttatcaaaatccttaagttatacgaaatcacgcttttccttcgatttctccgctcttctccactcttcttctctgttctatcgcagacatttttgtttatatgcatacataataataatacactcttgtcaggatttttgattctctctttggttttctcggaaaa

SEQ ID NO: 261 - DNA, 998 bp, Arabidopsis thaliana
  misc_feature (1)..(998): Ceres Promoter PT0660
caagtcaagttccaatattctaaggagaaataatagtatactaaacatacattagagaggttaaacttctttttggatttaagtgtgtatgcataggctatttattcttaagtataactattaactgtagctagatttatacaagaaatacataaaactttatgcatgtgaggtagccatgaatatacgtacatgttgcaatcgattatacatgttgtatttggatttctctatacatgttttaacttgtcattctctaagtatatacataccattaatactgtgggcatgagtttatgataagacttttcttttggagaccagttttgttttcctttccacctatatttgtctataggcttcacggtacactagtttacaagtgtttttatatgttctaaataaaattgagattttccggaacggtatgatctgtttgcaaataaggacgtatatataacagtatcaaatatatttgttgttataaggcaataatatattttctgagatattgcgtgttacaaaaaagaaatatttgttaagaaaaaaaaagatggtcgaaaaaggggagtaggtgggggcggtcggcttttgattagtaataaaagaaaccacacgagtgacctaccgattcgactcaacgagtctaccgagctaacacagattcaactcgctcgagcttcgttttatgacaagttggtttttttttttttttttaattttttcatcttcttgggtttggttgggtcactcttcaggtcaggtgtgtaaaaaagaaagaaagaaaagagagattgttgtgttgtaacccctttgactaaaatctaatgaacttttttaacacaacaaaactccttcagatctgaaagggttcttcttctctcttagtctcttcgtccttttattctccgtcgtcgtttcatgatctgactctctggtcttctcttcttcttcttcttcttctattttttcttacttcgtcactgttgtgtctgaac

SEQ ID NO: 262 - DNA, 1000 bp, Arabidopsis thaliana
  misc_feature (1)..(1000): Ceres Promoter PT0665
aaaaaggatgggtaatgggacctattttccccaacatcccacatgcacacttccctctccattctctcacatttatttctttcattctaatttatccattccgtgtgtaacatattcactaataatctcatctcactaactcattcattgattgtgatatgtttatctagaattagtgttttaacactgtgtctacatatgatttccttttcattgtatgtgaacatgttaactcactaatcattttgtattttcgagttaacatgagtctccacttcggtagactaaagtaaagataggtttgagtataataaagtttaaaatttgctttaaaatcaatatttataaataagtttttatcataagtgatttttgtatgttatattggaccttgtataaacagactacagaagaaaattatttatgagaacttgtaatgttagagtggacctcgtataaactaattatgtgggcttttaccataaactatttatgaaaattattatggcccacaccactataactaaagcccacatatttagcagcccagtttcattgtaagagacatgttcgctctggaactagaattttctggtttttgggtatttgttttcttatgtgtagagaaatgatggtaacgattaaatgttgtgtattacaatttacaatggtaagacgattaatatatttacacacaattttgttgttgctgtaacacgttagtgtgtgtgatgatagaatttcataaagctttaactacgaggggcaaaatgttaattctaaatagttgacagcagaaaaagatatgtatacataatataaggattaaaacgtaaataataataaataaggcgagttaaattaaaaccctgttaaaaccctagcttgaaacacatgtataaaaacacttgcgagcgcagcttcatcgccatcgccattctctctctcatcaaaagcttttctccttgattttcgcattctttagagtcttaacgcaaag

SEQ ID NO: 263 - DNA, 999 bp, Arabidopsis thaliana
  misc_feature (1)..(999): Ceres Promoter PT0672
cagccgtaaatcctccataaatttattttgcaagttttgctcattatataatgagcggaatttatgatataatcgtttgtaataatgttatgttttgatcaaaatttgaaattaaaagtaggtgagaacttgttatacagtgtagataaggtggatcttgaatataaaaataaaatttataagatgtatttaaagcagaaaagcataaaactttagataaaataatgtaaaaatgtgttagcatcaatgttgggatattggccgacccgaacttaatcaatgtcggaagccattacttctctcccaaaagacctttttccttcggagaactaggaacttcctcactacctttcgcttaacgtgaaagccataaatttcatatattcataaaaatcagaaaatctaaaactgtttagtatcacctgtttttggtatagactattggttttgtgttacttcctaaactatatgatttcgtacttcattggatcttatagagatgaatattcgtaaaaagataagttatctggtgaaacgttacttcagtcatgttgggtctagatttacatactactatgaaacattttaagataataattatcctagccaactatatgttctatattatgggccaagaagatatagaactaaaagttcagaatttaacgatataaattactagtatattctaatacttgaatgattactgttttagttgtttagaataaatagtagcgtgttggttaagataccatctatccacatctatatttgtgtgggttacataaaatgtacataatattatatacatatatatgtatatttttgataaagccatatattactccttgacctctgcccccatttccttttactataaataggaatactcatgatcctctaattcagcaatcaacaccaacgaacacaaccttttccaaagccaataataaaagaacaaaagcttttagtttcatcaaagacgaagctgccttagaa

SEQ ID NO: 264 - DNA, 1000 bp, Arabidopsis thaliana
  misc_feature (1)..(1000): Ceres Promoter PT0676
aagatagtacagtttcagtgttttgagaaaaaaagctgaactaaaactaaaatgtttaaggacacaatatttagtttcaattagataattcaacagtttgaacaattttttttttttttttttgaagtcatttatttatacaatgttttaaaacgcattaagcatttaggcagccgacaaacgcctattgtctaactgtaaataggcgcttccacttaggttcatattgcatatttactatatgtgtatagtgacaaaaaccaatatttctcttattttggatgaaggtatagtagttgttaaatgttcaatataattaagcattaatgacaaataaaataaaattaatttagttgataaaaagataatcttataaaaagatcgatgaatagatataatggtttactgaattctatagctcttaccttgcacgactatgtcccaaggagaggaagtaccttaactataattctgaacataattttgtctatcttggtgagtattatatgacctaaaccctttaataagaaaaagtataatactggcgtaacgtaataaattaacacaatcataagttgttgacaagcaaaaaaacatacataatttgtttaatgagatatattagttatagttcttatgtcaaagtacaattatgcctaccaaaattaattaatgatttcaacaggaagtctgagatgatgggccgacgtgtagttacgtttcttgaattgtgagagatggtatttattatactgaagaaaacattatttactaaataaattttcatttcacatcttctgtaatcaatgcgggtagatgaagaagttgttaatacgatggccaaccatatggatctcttttttggcgtttctatatatagtaacctcgactccaaaggcattacgtgactcaataaaatcaagtcttttgtttccttttatccaaaaaaaaaaaaaagtcttgtgtttctcttaggttggttgagaatcatttcatttca

SEQ ID NO: 265 - DNA, 998 bp, Arabidopsis thaliana
  misc_feature (1)..(998): Ceres Promoter PT0678
aattaaatgaaaccgcccctaaattaggagggatttgggtaagtggtaacacattcactggaaacatgtgaagaaaggaggatgtcaagtagctgaaaactcagtatagtaaccaacggcttctcaccaacctttcattaataatttggtcatccctatatttttattcaacattttgtttttcaatagcttagagcaccttaatacctttcagtgtttttttataaaaaaaacaaaaattgggattaatcatcaatccccaaatgtaacgtttacttagattatgttcatttttctatacacacaaatcatattcttttgttttaatcttcgaaaaacgagaggacattaaatacccctaaaaaaggaggggacattactaccaacgtacattaacatgtttgatagcaaacgatttattttgttcgttttgaaaaggggaaagtaatgtgtaaattatgtaaagattaataaacttttatggtatagtaacattttcgaataataagagagggaaaacactcgccattgtcggcaatttagaaccaatattagaagggtttttttagagaaaaaggacttaaaagtttagagaccttaacaacaacttatttagaaatagacatgcttaagttgacaacagcgagtttattttctatatcgaagaaaaatacgaactttttcttaattagatttcgaatgcatgcactatcgagaatcgaccgtcacaagaaaaaactaatatacatactgtacatatctatattcaatattggtggggatgggtttaatgtgtatttataattcatggataaattcacacaataaggtccatgaaactagaaggtaccaaaaataagcattaatgactctttgccacttatatatatgattctctcatagtaccattttattctcccaaacctatcttcttcttcctctcttgtctctctcgctctctctcttctacattgtttcttgaggtcaatctattaaaa

SEQ ID NO: 266 - DNA, 1000 bp, Arabidopsis thaliana
  misc_feature (1)..(1000): Ceres Promoter PT0683
gattgaatgatgagtgtgcacccttgtattactaataaaaaatttagcaacagttataagctaacgtcatccatgagtcattcattagattcactatttgcgttctcaaaaatcgaattgttaaaatttgagaagctctaatatacgagtcaatgagatgtggcaaaagcatgtccttgaccataaaatttcgaggggtcaactcattagataaggacaagaatcaaccaattgaaggcgtcttctataacaagtttctttattactaatattaaagtccaatggggtgagggggagaagaacttaaataaaaggaaataattggtaagtgaataaaatctaaatacgatactagatgattgatttgtgctagtgcatggtattagatcagatatgtgttactattcgaattcaaattggcatattccatgttgttgataagaaaattgtagaagtgtaaaagctgagttactatattcaaactagtggtttacataaagtgagacaacaactgtttcacaaaaatgactataaaatagtaagtagtattaggtcaattgattttaaaattttaatcaaattcaaatttgtgatataatcaaatttgtttatagaaaatgttaagaaatcaattttggcagaactaattcagtgagaaacaatcatttacaaaaacaattttaacattatttaacagtaagatttgacatttaacccgttcgtgtgaacccatcatatctaacatggctctacccatgacgcctccatgccatggacaattttgacagatcagaagttctgaacgtggacgaggtaagaacaccatgatgatacgattggagttagttatgtcgccaccgacatcactgccaatctcattaataaaagtggtactaaatctctaatctctattaactataaatataacaaagaaccaaaagaaagtttcttatctctcttatctttcataatttccaagaaacacaaaccttttctacta

SEQ ID NO: 267 - DNA, 1000 bp, Arabidopsis thaliana
  misc_feature (1)..(1000): Ceres Promoter PT0688
acgttcagaggcatcgcttttgtacaaattgaagcgggtttgttcaatatttaaaataacacaggaaacattcaaatgtattattgatgttgcttaggtttgtgaaatgatatgaaccatatcgtatatattactagatttttcttatatgttttaagggtagtggggctgacctatcattctgtttggcattaccaatcagactatcagagtattcaccattcaggattccataactagaaaaagaaggggtttacattttctcatactgtataattttctactatcagagattttatcgattacattaatctcatagtgattattctgatttataaaaaagttgacaaaataattaaaaccagtattttataacaagattgtctctctcccatggccattattttgacctctgacttatttaaatcttaattaacagcataatactgtattaagcgtatttaaatgaaacaaaataaaagaaaaaaagaacaaaacgaaagagtggaccacatgcgtgtcaagaaaggccggtcgttaccgttaaggtgtgtcgaactgtgattgggccacgttaacggcgtatccaaaagaaagaaagggcacgtgtatagatctaggaaaaaagaaagaatggacggtttagattgtatctaggtaccaggaaatggaacgtcacaccaaacggtacgtgtcggatcctgcccgttgatgctgacggtcagcaacttccccttattcatgcccccctgcccgttaattacgtgtaacccttccatgcgaaaatcaaacccttttttttttttgcgttcttcttcaacttttctttttaaatcaaaccttttctttttaaaatcacattgcatttcctaacgctcaacaaaatctctctctactaatatctctctctctctctctctattgttgaagaagactcataatcggagattgtttgtttttggtttgctctgtaaattggagaagttttgttagagatcaa

SEQ ID NO: 268 - DNA, 1000 bp, Arabidopsis thaliana
  misc_feature (1)..(1000): Ceres Promoter PT0695
aacattttctttaacttactcttaaattttaatagtaagttgatgcatgttatgttgatccgtcttgatcacaaatattgttttatggacgaattctttgacagtaaatggctatagtgactcagcttggagcatcccgatatgaaaacaaagtgcagtattgtgtcgtggtcatcactaacgcactttcctagaactatcgcgcgtgtttgacctatgcaacacaccagatgtcatgaacgtatacttaaatagaaacaatgatatagacaattggctatattctgtcatggaacgcaaaccggataacatgtctattagattcatcggacttgatcatggttatgtcttaatagacgaattctttgttaacgattggttaaaacggctcacgttagagcatcctactatgacttcaaaattgataaatattacatggaaatcactttaattttagttagaaggtagttaatttagatattcttatttaataaattaaaaaatagaagaaaaaaagatgagaagagtttttgtttataaaataagaaatatcttttattgtaattttaaaattaaacaaatttaatttatattaaaattatctttgttttattgttaaggcaataattatttttttggtgggaattgttaaaacaataattagtatactgttaagtggtcctttaataataagataacgtgatttaaaaaagaacgagacaggctaatatagtagagaggaaaaaatacaatttaggcccaataaagcccaatatagagttgtgctcaaacacaggtcttcgccagatttcctatgacgccgtgtgtcaatcatgacgccaagtgtcattcaagaccgtcacgtggcgttgtttctacacataggcgatccatacaaatcagtaacaaacacgaaaagagcattcatatgtacgaaagtagaaaagaagagactctttgtgataaaactaagtaagaaatagcataaaagtaaaaggga

SEQ ID NO: 269 - DNA, 1000 bp, Arabidopsis thaliana
  misc_feature (1)..(1000): Ceres Promoter PT0708
gtttccaaaactagtattctttatttgctctattcattatatttttatatttgtaacgtcccgaccgtctttattaggtttcgacaatcacttctcggaaggtcgtccatcctgaaattactctatcctaaacatgtttaactataaaattctctcgaaacttttgtaacgtatataaccacataaattctcttaaacttatttgcatacaccattatatttctgaaatcgatatgttacaatattatttaatatttagattacttttactgaatcgaattaaatatcaaatcgaaacaaatctaatctaccaaaaataattttgttataaacatttcttgcctagttctacctcatatacattttagttaaagaaagaaatcacaacaattcccataattcaataattaaatccacaaaatcttggagtaagtaagagaaataaaaagatagtatcttaacataaacaattcaaagatgctctctcacacaattcacacacacttacaaaacaaaagacagaaacaatgttttcattcaaatcaaaagaagttataacactagtacaaaaaaagctcaaattctaatagtaactctttttatttcccaattacccaaagattctctctcacttcacaaaactagctttgagagtcgtgttccacaaaatccattaaagctgaaacggttttgctcaccattcaaacaaatacaaaattgcaaaaccccaaattataacaaaataatataaaaattaaaccgctaaaaagagtgaaccaacaaaaatcgccgaatgtgtgtgtaatgagaaaaccgacccatcatcccaatcatctcttcccgtgtcactctcttcctctcccacgtttcttctctcttccctttatgggttttaacttctccttcttcttcttcttcaatcttcagttttcaaattcaacaacaattcacattttgatttcttcatcatctctctctctctcgcttctctctcaaatcg

SEQ ID NO: 270 - DNA, 1000 bp, Arabidopsis thaliana
  misc_feature (1)..(1000): Ceres Promoter PT0710
tagtgcgcgtggggagagggaatggtgaaaccttagtggttaagttatgaggaaaatgataaaaggataaaacaatcaaatgcagcttgaaacggccataacataaagtaccttatggtggtgcgaatatttttgtgtttctttcactcttttattgctgaaagctacgacacttgtcttaatatattgtttccgcaagtcacatgatctactttttatttaacgtctagaaacgccgagatatatgatgattagtatatcacgtctatgcaaattgttagttcgtgtttggccaaaagatatcgagacatgtctgaagaaccgagtctggttttgagatatttcttcaagcattactatacaatagaaaaaggagacacgcgaatatgataatagcaaaaggcataaaaaggcgaaaattaaagaaaaacgtaaagtgatttggcctcaatcaacgggaacgtatcttaattttagaggttcttcttttacttttgagacgagagagtttgcgtctttgcgagctgctttggttgactaaacattatcatattgaaaaccaaaatacaacggaggaatatttgtcacagtttcactttcacattgtttccttaacgtttaatcaaccttgttcaaaatttctatagttgtaatcatcattgtttacaaaattttcgttcaaagatgattttaaataaaattgtgaaagaaaaccttttctgaaataaggattggatgatagtgttaaaagaaaaatatgaactgaggcaaaaagaggagtggtccccggaagattgtgaaatgtgtcatctaaaccagccagacgtagtcacgtgttctctctagctttatgaacttccttagccagcaccatcattgtgattgtagtatatatgtaaccctaccttcatctctcccattttccattctccatatagactcctttacaatatacaaaacctatccaaaagcgaagaagccaagcaaacatattataaaa

SEQ ID NO: 271 - DNA, 1002 bp, Arabidopsis thaliana
  misc_feature (1)..(1002): Ceres Promoter PT0723
gtcatatcttatcaacacgtcaacgatcaaaacctttagcctattaaattcaacggcttagatcaaaacgaaactaggtgggtcccacttttaatatcgtggctgcataacatttcctcgataactgaagccgttgtggtctttctcagaatctggtgcttaaacactctggtgagttctagtacttctgctatgatcgatctcattaccatttcttaaatttctctccctaaatattccgagttcttgatttttgataacttcaggttttctctttttgataaatctggtctttccatttttttttttttgtggttaatttagtttcctatgttcttcgattgtattatgcatgatctgtgtttggattctgttagattatgttattggtgaatatgtatgtgtttttgcatgtctggttttggtcttaaaaatgttcaaatctgatgatttgattgaagcttttttagtgttggtttgattcttctcaaaactactgttaatttactatcatgttttccaactttgattcatgatgacacttttgttctgctttgttataaaattttggttggtttgattttgtaattatagtgtaattttgttaggaatgaacatgttttaatactctgttttrcgatttgtcacacattcgaattattaatcgataatttaactgaaaattcatggttctagatcttgttgtcatcagattatttgtttcgataattcatcaaatatgtagtccttttgctgatttgcgactgtttcattttttctcaaaattgttttttgttaagtttatctaacagttatcgttgtcaaaagtctctttcattttgcaaaatcttctttttttttttgtttgtaactttgttttttaagctacacatttagtctgtaaaatagcatcgaggaacagttgtcttagtagacttgcatgttcttgtaacttctatttgtttcagtttgttgatgactgctttgattttgtaggtcaaa

SEQ ID NO: 272 - DNA, 1001 bp, Arabidopsis thaliana
  misc_feature (1)..(1001): Ceres Promoter PT0740
tgtggccactaaagatttacccttaaccgggcccatataagcccacgtcaagtggcgcttatacgctctccgtaagagagccaacatttggtatgtaatgttgcaaattattcttcaagacaataaattcaaatataattcaatattgtccaaatatagtgatgtacttcagttgtgcacatagaaactccactaaaccaacttttagatagatgcattcacaaattttcaacaatgtcgcgaaagtctaatccatcaccagattctaacattttaattattatatttaactatacatactctaatcagcatgagtcaaacgtgtacaatagcccaagcatataataagaccaaagtcaaactcaaataaatgtctccaaactcaaaacttgaaaaagacctaattattacatggtagatatgactttgtcgacaagtaaaccaactaatcctcgaagctaccttctcttcccagttattatgtgtgatcgatttataaatctcttcttctaataacacctatatttttcttatgatgtgaataaatataaaacttttaactttaaaacatatttatccgaaatattgcacttagatttcaaatagataaataatagtactatctaactgatattgaaaagacctaacacggaaaacagttttataaaaaatcccaaatgtgggtaattatcttgatttcttgggggaaacagaaaatggattaagattaatcggagtcgtgtcaagcagctcgttaataactgtagcaagttgactgagtaagcatcaacgtgtcatctccgtaaagcccattatttctagtctcgccgcgtcttctcttccacgtagcacttcactttttctctccttttgtttcctttggaacacaaacgtttctatttataggaataattacgtcgtccgtatctgtgtcggaacatagatccaaattaaaagcgacttacttaattacatatcgttcgtgtttttttcttcaaaaa

SEQ ID NO: 273 - DNA, 1024 bp, Arabidopsis thaliana
  misc_feature (1)..(1024): Ceres Promoter PT0743
tcgattggcccgatcggccccaaaatcaagctgagccgcttcaaacttcagcttttgaaatcacccccaaactcatgtcctcttatcattataactaaaggatctttcattttatttaactcatcgtcttgcactacccaacccaaaggttccaactatacccgaagctttctaaaggtccaaagactttttttttcgagccagactattcaagccaagaaaagccaaaccccacaagccagtacttttcaattccatattataaacttatctgtcttgttttagtcccactaaaaacaacagaatttaatttaggttgagctaaaacccttgacaaaagtgtatagtcgtcgattcagtagcacactcatcactcatcagatttgatagttgacctaaagtatgactactccatttcaactaacaaatgaaaataaaagagacctaagggttagaggattgaaactatactctcaagtcttttatcactaggctactaccagctagttaacttgatggatttaagcaagaaaacgtagaatttatattcgagcagattgtttagctaaaaaagcttgggtttgaaattgccttttctcccatataagcacgtcggttcctaaataactctttctagcggagagtgtctttccaataatttaataaaaatggtgtttgtatatcaaaaaaaaaagaaaaaagaaactgatcgagatagaacgtttgcagttttataaacaatttaaaaaacaaaaaaaattaaactcaatgtattttttattaattcacaaacaataataaatcataggatcgaatatttacacggtatcaaaacctactcgccgctactatataaaaattgaagtcaaatatcaaccgcaattattaaaccagcaagacaataattcataaacttaatataaacataaataaattaatgttacacaacgatatatggtgagggttattactatcttcttcctctcaaaacacatctcctaaccttaagctttagacggcctgc

SEQ ID NO: 274 - DNA, 1000 bp, Arabidopsis thaliana
  misc_feature (1)..(1000): Ceres Promoter PT0758
agctagccacatcagtgaccaaaaaagataattaacaaaccaaataaaataacaaattttgatcatttggaataaaatttataaaaggaacgaaagcgccttctcacgggtcccatccattgaaatatattctctctttttgctctatataataataacgcgtactaatttgtagtatatattattacaaagtcgatatttgattgttttgtgaacgttgatatattaattttcttggatgatgacaaaaaaagtcatagaaagtaacgtgtgaacatagcattaacaaaatacaaacataatatataaccaaatatatgaaaataggataaaatctcattgaatagatcttcttctattcaaatatataaatatttgtttgtctataaaattaacagagcattcacattatctaaaataatagtaaaatcaaaataaaactaaataaaaataactctggttttataacgattgattttaaatattagtttttgttgtaaagagatcattatatatgtctgtaatatttttatactgagttacatgatatttagttattatagcgtaattaactaagataagaaattaactaaagtgatattctgattattattatttttgttaggacacgtacgtggaaaaactaaacactataggttacaaaacggtataataaactcaccattactggaaaatgtttgcatttgactcaataagtaacttattataagttactgatataatgcatagttttgaaattcttaaataaattattttggtttcgcatgaaaatatgaaaggagagaaatttattattgtcacttatatatatatacatcgtaatcattttttcgtgaataattctctctcccattccattatttctcagtatctctctttctttcccttactttattgttgcttttaaaccttcaatttgctcataaaccaaatatataatatcaaaacaaacaaacaaaaaatcagaattcccctaata

SEQ ID NO: 275 - DNA, 921 bp, Arabidopsis thaliana
  misc_feature (1)..(921): Ceres Promoter PT0829
aaagttttgaattattgggaatcaatttcgaagttttgtaattctttgggggctaataggatattttattttcttggtttcgtctattgttgtttttctatttatggttgggcttttagaactctggacaggcccatgtcatatgttttcccttctccttatatttttcatttttcattttgttaaattaatgcataatatccaaaaacaatttaaatttttgaaggaaccctttagttacggctccgaagctttcacaagtgagaatgtgagatcaaagaaggcaaatggaggattttaaaagttaaaatcatcttttatctgcaaaagttgacaatttttttgtatcaaatctaaatcatcaaactctcttaaactacaagagcataacaacctctatgtaatccatgaaataatctgcttgaaggacataacataaatcattatggctagagtgactaacttcaatcaaatcctcttaactctagctcccttacaatggtatcgtaaaacattatgcattagggattgttgtcctaggaaaataaaataaaaatccccacagaccaactaccattttaacttaaaaataagcttcgtccgcgacgaattgttttccatcctaaaaatagaatggtgtaatctgctaatggtttagttccattaacttgcaagttctattgaaagcctaaatgtcaataaagatattaaaattcggagtcaaaagacaaatgaatcaaaagcaacaagacaagtcagctccattcttcactacccatcttttacaataaatcatctctcttttcacaaatttcaaactactctcattgccctttagctttgttatagagccaacactacagagagactcacacacttgtttcaataattaaatctgaatttggctcttcttataaacta

SEQ ID NO: 276 - DNA, 763 bp, Arabidopsis thaliana
  misc_feature (1)..(763): Ceres Promoter PT0837
aactacaagggagacataatatcaccatctggttcctgttatcatctgaagatttcttgttttaccttccagtgataaaatgatccttataatacatatagatatattaaattgctgtattttaagattatagatatataaggtacatgagagtgtttatttaaaaaaattcacttggaattcatgttttgtgatacgttagattggaatccatttgggaaaagaagaatcatctgttcttatgtctcaaattttgacttcattcacttttcttcttgtcttttaagaaagcttccacaatctaactgttcgatgtgaaaactgagattcgagtaagaaaatgtgaactgtgttatactgttttttaattagataatttagattgcactcagataaattaataacattcctcgaatacttttatgtgattggatatattaggtatatctgccaaccaaccaataaactgctatgtttaaacaaattaaataaattagtatatgtttactcaagaataaagaagatagaaaagaaaattctatatgagctaaatttgctggaggaggcatcggacgtgggtaccagacctttccaagcacacgagtagtgcttagccatgtcatgctaacatacaccatttggttcatacaaaatccaaatcaaaatctatttttaaaatcttttgcacacgtctttgaaaaacacctctcatactatagctacggaagcttcaatttcaaggtttgtctaaaagctaacgatt

SEQ ID NO: 277 - DNA, 751 bp, Arabidopsis thaliana
  misc_feature (1)..(751): Ceres Promoter PT0838
atactggtatgcttaaggttgaagccaagatctctgtcttacccaagtaaccactttctattagaagggatcaacactaagaatatggagatttaagcctaagggctaaggcggttctcaacaatacatgatgtgaatacaatcacagacgatttactgaggtttgttgataagatcttgatcagtctctgcatcatctgttcaacaatctcaatctttgactgtttgctttcggagccataaacagaggaatcccttattccctgttataggagcaatacaccaagtattatttccatggctgaaattctcttatggaaacctaattgttccattgaagctgtaaaatcgaatctggtgaatattctcgagcaaagccgcatgctaattatgtcaattcagaagagtttgattaggagactcgaagcgagtttgatgatctttcttgatgttcaactccgattgtaagggtataattgacttttcatgtattacggctccaccacctgacactaaggcactctttgtccatctcgttggtatcatcggattcggatggtaaaaataaaaagagcagaggaaacttgttactcatgcaagcttctcaggtgccacgtcactccattacgtgtcatcttcacacaccatctcgctcaaaaccgatctcatttttcaaaccttaaaggcagaagcaactgattaagttaacactcttgagaagctctcgattaagcttgaacttggaggatca

SEQ ID NO: 278 - DNA, 669 bp, Arabidopsis thaliana
  misc_feature (1)..(669): Ceres Promoter PT0848
tctctttaaatcagttaactaaccgtttatatatttacgataaggtttgaagagattattgataaaataatacatttcataatcccgcgttcaaccgtttaaagtaacatttaagttgactatatctaattttttttccattaaatatggagctggtaaactttatcaacttctaaaaagtgtaacaacaaaaattaggtcaatcacaattctgttttttttattattttggattgacttccaattgcaaatagtcttagtgatcaccattatcatacatatatacatcaagtaggtttcatcatgatataccacaaagtatttgacaagccatatggttttggatcaaaaagtcggtccaaaattaatgttttatgtgcaagaaccgacccattgtacacacgtgttaacatcttcaagactttcatctctatttttcttttggtcattaagatacccattgatccgaatctgttacattcccacctacttttttaatttttactatccactccaaattaaacacaaccgatgattttaataattggaagcttttaaaaatatttcaaaacaagcctctttgtgtttgtctatatatatacacgtaataagaaggtgaatgaatctcacagcttacttgttctaaggcttccaataacgaaaacagta

SEQ ID NO: 279 - DNA, 702 bp, Arabidopsis thaliana
  misc_feature (1)..(702): Ceres Promoter PT0863
cgggaaacgacaatctgatctctagtccagtcgattggcccgatcggccgattataaacttacatgagacaagtataaataattattataaacttattaagtttaagatcaaggcttttgtgcaatgtatcaatgaatgttagatgtgatatgatgaaagcaatgttttaaacacatacatagtcattgatcggaatgtgtgttattagaaatgcatgcctaagccgatagggttatctatgtttggtcttggacattatagccaaatttcgaatctaattcttccaatatatatttttttttttttgcttagggccactactagtattgcttatcaattttaagagctcatgaaaatgcaacaatatagtagttgcaaatccttgtttcaagagaaatcaaagggccacttgtgaattgaataataataatatttgcaaataacctttcactaaaccataccaacaaaaccacacagatttggcaaagacataacctttgggagacgtgaaaaggctcaaaatttgacaattgtccttacaaattcgctcattagtgcaattgtgagatttgtttgcatccaaatccaattcataactcacactcgtctcaaattcgaaaaggcctgcagggccagtgcactgggatccaacaatgtcctccgactcgtccaagatcaagaggaagcggaaccgcaccgcg

SEQ ID NO: 280 - DNA, 435 bp, Arabidopsis thaliana
  misc_feature (1)..(435): Ceres Promoter PT0879
ttctaggaagactggtcaagctaagctgtttctgttttttgtttttgtactttactttttgtttgctagtgggaactgggtttattgggccttgaagttgataaaagatgaataaaagacatatcgcctaaagcccatatgagaagcagaagacaaaaacctccaactttgggcataaattttgattatagttaaaagtccagacccaatttggcacctggcttagttacgattctaaggcatgacacctgcctaatatgtttattacagaaaataaagagaatcagctaggtgtcccttattgaacacattaacaaactccaacgacactacgtgtcttcgtgactcttactatatccaaaaacctatagctaaagctgaattttccatgattagtatagtcccaaccaaaaaaatactgaagaaggcataagc

SEQ ID NO: 281 - DNA, 397 bp, Arabidopsis thaliana
  misc_feature (1)..(397): Ceres Promoter PT0886
agtgtatttgaaaacgacattgaagaattaatatatttttttttaattttagttttttatagtacaaatattaaaacaaacaatcctaccatatcataacatttgtaaataacattttaagttttgttttgagttttaattaattttctatgacaaaaaaatgaagtcaatagactaagtgaatcatatagtataaataaacacaatttaaatagtttcaaataaatttagaaagaataaaacaaatagaaatcagaaggtgtctgtttcctcctcgcaacatacgatcaaagagaaacaacttgaccctttacattgctcaagagctcatctcttccctctacaaaaatggccgcacgtctccaaccttctcccaactccttcttccgccatcatc

SEQ ID NO: 282 - DNA, 1024 bp, Arabidopsis thaliana
  misc_feature (1)..(1024): Ceres Promoter YP0007
agcagaacaactatatttattgtgtcacataaatctgagatcatttataaccaccaaagaacctatacacagtaaatgacaaatgtatctccctctatctctattgcccatatgtagatgctaaagtaagatttctcttttttttaatgtacttttttttgtataaagtatattccataagaaaaaggaaaagcttgtttatggatcaattgaccccaaaaaaagtttttagatcaaagcccaatataaaaaaaaaacacagtagtgacacaaaggaacttaaataaaccatgaattgatctataaacagtagagatcgataaggcgaacattttccatgtgaagtgtcttctttcatctataatatttttgacatccaataatttcctctataatatcattcacataattgatagaaacattatgttagaattgtccacatcatttgagctgtaatatattctgttttaacaaattatatggtagttgcttaatcttatgtccatcttcttctatgcatcgttttcgcgcctagttgtccagtccatttcaactacctacctctaattcttatcttaaaacaacattttttaatttaagtattatgctcaaagactaactagatagaaaaccgttattaaacattaaacgaattaaaagtcttacatggaaaatgtaggtttataaaccacgagttatgattgacaataaaaaaaatgcaaatcatcaatcaaaagagacttgagtgcgactctatatcaaccattgcaattaaaattatctatcacaaaaattttagacagattaagttaatttagtctaaattcactaatttattttctataattagtaattaactatatttatttatttacacattttctgataatttagaaatttgcatgaataacaaatataagattttggaaattagtagcaaatttaattaataattatttttgcctaaatgaaccaaactataaaacctccacatacaccagtcatcaaatttacagagacaaca

SEQ ID NO: 283 - DNA, 1000 bp, Arabidopsis thaliana
  misc_feature (1)..(1000): Ceres Promoter YP0008
ctcgagagatgaagtcttagtaatgtttgaacaaacaataatcacgttttccatcaaattcgagcatttaaagtttatattactacatgccccaagatgataccgtccatctcatccgaaaatatttctgaaattgcgctaagacaacaatgtttgctcaaattcgatcatttaaagtttacaaatctctcatcaatcttacaaacttctcacactaaacagaggtacatattttcttataaagacaaaaggttcgaacagctggcttctcaactcgagttgtttgtcagggcctctcttcactaactacaagttggtacttcaaatattggtggctagcttcacgtgatattgtctacaaattaaacccatgaaaaagctgcattaattgttccaagtgaaccctgaggagtgtcaatagtctttgctttagtgtgatcattaaaccaaatctctaaattcctaatttgtactaacatttggaacgtatttcctactcttctccctgctccaactcccaaaaataagattagttagatttctataactaatatacatgtatactcccaaaaacagtaaaaccatattaataaagctaattttgcatagatttatttcggtaaaccggcggttcaagttggggaaaaaaaagacaaacggtctaaagtcatccaaagacaaaaaaccaaagacaagttgagagagacgagaccaatcacaacattgcttcgtagattgcgtgacatcatccttgacggctactttcatttgtgtcttatttggataaaacgcacgtgtttaattcacgaaccttcatagcaataagaaatttccattactttcatattttcaactttttttattacccattacatgcttaaaatattaattcacaagtctttgtcaaaattcaatattttccaggttcatgaaccctttttatctcaatctactctataatatctccctataaattacaacaaaacctctttatttttca

SEQ ID NO: 284 - DNA, 999 bp, Arabidopsis thaliana
  misc_feature (1)..(999): Ceres Promoter YP0019
gatataagtagaatcattttttgccgccgtttctcgctaacacaccgaaaactgaatcaaatctcctagctcttctacgcaaaatcgagtgcatcgacaatggcggaacgtggtgtcgaacgtggtggagatcgcggcgatttcggacgtggattcggtggtcgcggcggtggaagaggtggtccgagaggtcgtggtcgccgtgcaggtcgtgctccagaggaggagaaatgggtgccagtgactaagcttggtcgtctcgtaaaggaaggtaagatcacaaagattgagcagatctacctccattctctcccagtcaaggagtaccagatcatagatttactcgtcggtccttcattgaaagacgaagtgatgaaaatcatgccggttcaaaaacaaaccagagccggtcagagaacgagattcaaggccttcatcgtcgtcggagatagtaacggtcacgtcggattaggagtcaaatgctccaaggaagttgcgacggcgatcagaggcgcgatcattctcgcgaaattgtctgtggttccgatacgaagaggttattggggtaacaagattggaaaaccacatacggttccgtgtaaggtaaccgggaaatgtggatctgttactgtacgtatggttccagctccgagaggttctggtattgtggcggctagagttcctaagaaggttcttcaattcgctggaattgatgatgtctttacttcttctagaggatccaccaaaactcttggaaacttcgtcaaggtatgtactttcacaatggctgttttggtttgatgaactctgaattaggcagtgaaaaagtaatcattaccagttaagtgaatttatattgaagattaggatttagctgattgtattggtttgagcatgtgagtttgtgtttaagattgcttgaattgaaatgctttaggttgtttgattacgctaaattctgactaatgtaattcaaattgttgttgtttttttttggtc

SEQ ID NO: 285 - DNA, 1024 bp, Arabidopsis thaliana
  misc_feature (1)..(1024): Ceres Promoter YP0028
gtcagtgaagtcgattggtagtacttgaaacacttggttggtttcatgtatttggcctatatataaacaaacatcgtaattatatacggatttttttcggaattttacgccatatctgtaagtatatataacatgcatgtcgttttcaaattcatatgatgaacgatccacgtaagtgctactactcctacaatattgcatgagagagatatgtatttataaattttattttgaagaagaaataagagggaaggttacttgggtggatcgatgtgaaaacaaaagaagaaaaagcgaaacccactaagccattacatgatatcgaccttcttatctttttcctctttattttatttttctcatcttctttttgtcaggacttttttctacttaatgaaacctccaaactatctaactaatacactcccatgtagaataaagaaaattatataagatattgttgatattttgtaactagaaaatatatttgctctgtaatttttcgtaagttaaatcaacattttaaagtagaaacaaatattactgcaaaaagtaggatcattatttttgtccaaaatctcagttagctatagggttgtagtaaaaacaaaacacattcttgatttgccccaaaaaataaagagagagaagaatattgttcaaaagtggtctcttctctctctaattatgttttcactaaacccaattagattcaaacagtctacaaagtccaaaagataaacatgggacaacaattcgatgcaaaaaatcctcttttcatgctctttttttattctctagtcttttaaattactaataaaaactcacaaatccaccaaacccattctctacaactcaccttcatctagatttacccactcccaccgagaaacacaagaaaaaaaatatacatatataaatatacaagacaacacatgatgctgatgcaatatacacaacaaagtattaaatcttagatattgtgggtctccctttcttctattcattttcttattcattaaaa

SEQ ID NO: 286 - DNA, 1024 bp, Arabidopsis thaliana
  misc_feature (1)..(1024): Ceres Promoter YP0039
ccgttcgagtatttgaaaatttcgggtacacccgcctaaataggcggaccttatctagtatatatatacatttgaactatattgtttactttttagttgatttaggctatgtcatgacattgacataaatctacctgttatttatcacgtgtaattcgtgtaaagtgtaaactagaaagttcaaatacgtatttgtttttgttctgttatataggattgtcatagttgtaaatctacaatttattacaacatgaataagtacacaagcaatgtaattggatttaattgctaaactctttacatggtcaatctaaatttgataagaaatacgtcacatattactaagactgatagtttttttgttgtcaccaattatttttgttaaattgacgaaaacaattccaaaaactcaaatgtacaaaatcatacagtctcacaaacatctcatagagaaagatataaatctcccatatgggaacgataacacgaggtcgaaatactattcgtaaaactaaaacgccttagttataaatcgttagttgtaaccgcggtcgagaatacatacagatccacgaaactactactacacatgctgctgaattggaatttggaaaagaccatcttctttaggaagagctcacccaatgagtgacaaaggtgtcggtggcttgttttctacccatatgtatacatcaaatggtagtttcattaacgtttggttttgagaaaagtaagactttggctagtagctaggttcgtatataataaactcttttgagaaagttcatcactggtggaaaatgttaaaccggttttttctcattttttccgccatgttaaccaccggtttaaaaagaccgtaacacattgaaagattaataagggtatatttgtaattacggtttgctggcaatttttaattattattttaattagagaaaatagagaagccctatcaatgtacatggtatatatataaaaggcaaaaccctagaaaacgatactattcgactcagccgtcctt

SEQ ID NO: 287 - DNA, 1024 bp, Arabidopsis thaliana
  misc_feature (1)..(1024): Ceres Promoter YP0050
aatctgatctctagtccagtcgattggtacttgagggaaacatcatatttttaaaccttgtctcagtaagctaacacacaccccttgtgattacttatccatgtttatccacaagaatgcagttggattgagatattttcttctttgttgaaatcaggcctcaaggtgttcatgtggtctgcaaaaaaattcccaaaaataaagatagtgacatctgaaatcgataatggattagacgaagagtttcgtgttattccttggtatgggcgggtttggggacagatattttggcacagacgaggactaggccactgtggtcctgcagcattaggtgtcccttccatgtcctgcattacattttattgatggattcatcaccctatctactacaacggctacacaaactatgaagagttttgtttactaataaatgcccaagtgaggggtcgatcgaacccgggacacgtttttcagtttaccatatagaattatccttggaacccttgatactccatagaacatcaccacctctgttgtcatctcaggaatccaggttcaaacctagtctctctctccctagtgggaggtatatggccactgggccaatgatgacaaaatgcaaaaaaaataaaatacatttgggttcattatctaaaatatctcttgtgtttgtaagttttggttgcacactcgtgtggttgaagtgtgtgtgagaggtactatacaatacactctgcttttgttttgtacctatctctttctcttctccacatatccaagactttggggataaagctgagatcattggttgccatttggttgtgtagaagcaatcacccatttgctttatccgaggttgataaatttcctcgggttctccttctgacacgtatgacaaattctaatagtatattcctcgtagatattacctatatattctcaatagttgcaggtacttaaggctttgtcttggcatcctcgtcctcttcagcaaaactcgtctctcttgcactccaaaaagcaa

SEQ ID NO: 288 - DNA, 999 bp, Arabidopsis thaliana
  misc_feature (1)..(999): Ceres Promoter YP0086
cttatcctttaacaatgaacaggtttttagaggtagcttgatgattcctgcacatgtgatcttggcttcaggcttaattttccaggtaaagcattatgagatactcttatatctcttacatacttttgagataatgcacaagaacttcataactatatgctttagtttctgcatttgacactgccaaattcattaatctctaatatctttgttgttgatctttggtagacatgggtactagaaaaagcaaactacaccaaggtaaaatacttttgtacaaacataaactcgttatcacggaacatcaatggagtgtatatctaacggagtgtagaaacatttgattattgcaggaagctatctcaggatattatcggtttatatggaatctcttctacgcagagtatctgttattccccttcctctagctttcaatttcatggtgaggatatgcagttttctttgtatatcattcttcttcttctttgtagcttggagtcaaaatcggttccttcatgtacatacatcaaggatatgtccttctgaatttttatatcttgcaataaaaatgcttgtaccaattgaaacaccagctttttgagttctatgatcactgacttggttctaaccaaaaaaaaaaaaatgtttaatttacatatctaaaagtaggtttagggaaacctaaacagtaaaatatttgtatattattcgaatttcactcatcataaaaacttaaattgcaccataaaattttgttttactattaatgatgtaatttgtgtaacttaagataaaaataatattccgtaagttaaccggctaaaaccacgtataaaccagggaacctgttaaaccggttctttactggataaagaaatgaaagcccatgtagacagctccattagagcccaaaccctaaatttctcatctatataaaaggagtgacattagggtttttgttcgtcctcttaaagcttctcgttttctctgccgtctctc

SEQ ID NO: 289 - DNA, 1024 bp, Arabidopsis thaliana
  misc_feature (1)..(1024): Ceres Promoter YP0088
tcgattgggattactacttcatctagtaaggttctgaaaacgtttgttgttgataaggaagattcgtctcaggttattactgttgatcttcaaggtttgtgattgtgacgcttatacatgtgctgaaactgtggtgtttatttattgaaaacaaaaaaaaagtctctcttgtagtttcattgtactaaatagaaaacaagaaacgtttttttctttaatcttctacattgataatattggatcaaaggattgtttctgcaagacacaacacaaacatacttatactagtttacttctactaagtactaactacatacccatacacacacttgcacctagactttacttctagacatcattaccctaaggtagaaccaagcttacaagcaagttttaccgacaactcttacattacaactctagtctgtagtctttaacgtagacttactaactagtcattagtggtttaattttttaaattttcatccatatgtttttgttgtagatataaactaaagtcggtcacatttaataattgtcattatgtccgcgtaaaagtcaattcagctattggacatttatgaaatgtaagattttctctctcatttccccgtgcgtgaagacatgcattggtttttctgtaataatcaacaaatccaaaccccttttcgatctttatttggacattgttagagacaaaatttctctatagtctttttcctaatttgataccatgtttttgtttctgcacaaatttactcactggtttaactaactatccacttatttatgattttaccattaggcgtcagctagccctagtcaaatttgtaaacaagccaagctatctacataaatcgagatgtcattaacgttaatcgtcgttaattcgaatttgaaaacatagatagctttagcagtacaatgggcaatggtaagaagaatagcaaaaggcccaatatttggtttgcagaaattaaagccttaaaaaaaagcccacagatatttgtcaaagaaccctaat

SEQ ID NO: 290 - DNA, 1024 bp, Arabidopsis thaliana
  misc_feature (1)..(1024): Ceres Promoter YP0092
aaagattgagttgagagagatggtggagacgcagaacagacaaagggagtttaccatatagtgctctaaagggcaatgagattgcagtgatgtggctatccggggaatcatcgcaggttattccttcccatgagcaacaatcaatggatgggttccaattcagaggagaaacagaagaagaaacgtttccagagaaccacagtagggattctcgatcttgcgagttgcagagagcctctgaaactgcaatagaaaggacactgatgaaaagaacacactgaaggagtatgccaatcatgtgaaaactcagagcttgtattggtcttgtggttgatgaagttctcacaaaacctttggctttgaatctcccctcattagtcatggtgagaacaagaacaagacgagaaacagacaaagaagatgaaaaaacttgttggccagtgttgactaagggggaatagccccagacataacaaaattagacttgtcgtacatctttaatatttttttatctgtttctttgtcctgacgctttcattattcctgtgatcaattttctcataccattggtccatcgttaatcctttcttaatttcattttctacgtaacatgagaggagaccaagtcctatgagaacagttgacgtaacagtggttgttaagttaagttaaaaagaggaagctagtgagagtgaccgttaggtagagaagtgagatctttaaccactcttctttctctctctctctgcttttttcgtcgtctttcacatctactgttcgcaaactctcttatgcttccaataatggtgataccaattgagacttgcaggagaatctcctcttctccacactctatcaactggtcagccatggaatggtcgtttcagtttcaatattcctggattctttttaaggattcctgtttctcttctgttcctggtatattcttaacgacgaaattagtatcggatcctggtaatacattttgaagcttttaagtaccattgcactgggatccaacaat

SEQ ID NO: 291 - DNA, 1020 bp, Arabidopsis thaliana
  misc_feature (1)..(1020): Ceres Promoter YP0096
gaggtcagtgagtcgattggtgcaaaattgaaaaattgaagggtgaaacaaatttaaagataatatctattaaatcctctaattttaaaaatttagcaaaaattgtattttcttatggatctgttagttcacacgtatcttaattagtaccaaatcatatctaatgattagtgataaaactagttagatatctatatgtgtctttaccatttaacttgaatccttcttcttttttttacgtaaacaacttgaatccttcgttaatacataaatttaaagcattttttctttaattctattgatcggtatatatttactataagttttagctcatatgcaatttcaaatgatatgcttttaaattttgtctaggtgtgatagttgtatctttaacataaatcttatagcaaaattatacttgatattctaaatttatctatttgctcttgtgaacctcatattagtctagagaaactttgaaatcctttcaattagttgtatgtccaatacatttttactaacatttattagtctttttaattaagattattgttagaaaaaaaaagattttttaaaaataaataatatgttttagatacaatgtgagttaggcttcttatattttaaaaaataaatttatttcatacttaaaaatagtttggaatttcaatttatttggctgaataccataaaatatgtcaatttgaaccttatacccattgactatttggtgttagaaaccctttaacaaaaaaaaactatttggtgttagatatcaaaataaaaaaagtttaaccattggtttcttatattgaattggatattgttacatgtattaaagtttttttggtttaattttgaaacgttgatagaaactattaagtttaagtttggtagtatatttatttgtggaaaatttaattgccattaaatataacgtcaactttttttggttttttttgagaagttacgttgtgattttgatttcctatataaaagttagattacgtcattttttaa

SEQ ID NO: 292 - DNA, 1000 bp, Arabidopsis thaliana
  misc_feature (1)..(1000): Ceres Promoter YP0097
ttcatctttatatttaagagtttaaaaactgcaacttttgtttttctttcactaagtcttatggccacagttaattaaaagcagatgaaaggtggtccaatggaaaaggagaatgtgattgggctagttgggagagttctgatgtctagtgttgggtacacgtgtccgtcagttacacatagcattaaatcagacggcatgtcattattcaaatctagttcacatagtacgactaatagctgataaattaatgattatacagcatatgaattatgaattcaaaaaaaaaaaaaaattgaaaatgttaaggagatgctatattttacaaaattcatcgcaatgctttctactaatttgctaagtggtcttctccagttagtcttgtcgattccaagcgatattattaaatcttgaagcatcgctcaaagcattatagcttaagataaccaaattgttattaaaaacacctagtgaaatttttaaattaaaacaattttgatatctttgtaatatctaatactactctttctgtgtctaaaaggattaattttcaaaaatttcacacatattaaaaaaaaaaaaaaattactagctaaacaattttcaataatcataaaacaatagtaacttaataatttttttttattttcaaaatagtccttcaagtttacaattcattttagtattataatcaacaaaatttgtattaaaaagttggaaaattaatctttgtggaacaaaaaaatctagaaatcattttttagaattagagagaggtttgataaaaaaaaataaaaaaaaatagagagaggtagtacatactaaacgatgtgatactactattgacaaaatcttaattctcagtttagtagaataaactagaaggaatgaatgaagtaaatgcgaatccaactactaacaaaccctacttagtcatcatattttcccatatgaaatccctatataaacccatcatcatctcccacttttttcatatcca

SEQ ID NO: 293 - DNA, 1004 bp, Arabidopsis thaliana
  misc_feature (1)..(1004): Ceres Promoter YP0101
ttctcgttctctagaatattgctggaccggattaggtcaatattattgggccagattagatattgaattgtcgacgttgcttacgttacgttatatcttgtttaagaattaaacctatcgacttagtcttaattaagaaaacattgccttaaattctctggtctgcgaccgtttttttgaccgttaacccctaattaaagaaacaaaataattatagaaagagcactgaaatgtgattattttaacagtactcttatgagaaaattcgtactttttagttttttttttgtacaaatctctaagaaaaacactactactaattaagaaacgtttcaaacaattttattttcgttggctcataatctttctttctcggtccgggactaaccgttggcaaaaaaaaaaaaaaagttgacaataattattaaagcgtaaatcatacctctcaaataaaaacttgaatttggaaacaaagacaactaaaaaactcgaatttaagagaattcctaaaatcaagtgaagtatcatcacttggtaaaatttcataaccgttggcttctatttctatgtgtgccttggtttgcaggagataatatttcatttccaaccaatgatattcgtacacatagtcaaacaaatgtttgtctttgttattatattgagaaagaaacaagaaagagagagagagatagataagacgaaggaagtgaagcttccaagcgcccaccgttaaaaatctcgtgtgcaagtttcaaatacaagtggccggtggtctccataatttgatcgtcatccaattaaaaaggaagaaaaagcgtgttttatacaagaaaactcattaaaatagcaagtctagaaatatctcaacactaatctaccacgtctattacacacacacacacacacacttgatcttaatttattttcaagattcaagaaaatacccattccattaccacaacttgaccacacgcctatatataaaacataaaagccctttcccc

SEQ ID NO: 294 - DNA, 1000 bp, Arabidopsis thaliana
  misc_feature (1)..(1000): Ceres Promoter YP0102
atttggttgataacgttttcactcgactaattatatacttcagaaggatagtaatagaataccaaaataattaaatgattggttagtgccttagtggagactttttaaccgattctaatagactaatgatgtagctaagcatttatttgggatcatcactgtttgaaaacgtgaaatgtgataaaagttatgaaacgattaaaatataaaataaccgtacaaaacattatgtaccgtttttttctctgttcttttggcgatttggtttagttcgttacactctaaatgttattgcagatatatatataatgatgcatttgcatctgaggaacatataattccggttaacacttccaaatcttatatccgtctaggtagggattttataaatcatttgtgtcatcatgcgttatgcttgtcggctttgaccataacgcagagatatagaactagcttttacttaacttttagatttattatttgatctagagttaagtggagatatatagtgtttttgttagattattggtggatgtgagagtttgtctttagtttcaagttgagaatataaggcaagaggagactctgaggcaatcagaggttttgattggcaaaatatccaaaaggcccaaaccaagtcgaagcccatctcgtacaaaaaaagaaagagatctgtaagaaaaaatattctttgatattcttacaaaaataagtgtaaaacttttattagtcaaaatcttcaatctttaaaaactctcatcactcctacgaaagcgcgtgagagttatgagacattccttaatagcattactcacaagtcacaagttcaaaacgtctgactgaaacagaaacaagcctttgttgaagtcttgaagaagagacattagtactcgtcgtatagccataaaaggtaatatacgaaatttcttcgctaatctcttcaccttcctctacgcgtttcactttcactttataaatccaaatctcccttcgaaaacat

SEQ ID NO: 295 - DNA, 1004 bp, Arabidopsis thaliana
  misc_feature (1)..(1004): Ceres Promoter YP0103
gttttgaagaacaatctggatcgaaatctaacataaggtcatcgtattcaagttacgcagtcaaggacttgacatcatcctactctggtctgaggttaccacttccaaagatgggatttttcgactcggtatgcttcctaagaaattcgttttattgaacctagcaaatatcttgtaatgtaagattcctgagatgatgaagaaaaaacaaacttttgttacagcaggagaacggagagaaagaaaacagagaaccaaatgctcttgaagcaaacagaagaagaagacacaaatccaaacttgagacttcttctacaccagaaaaccgcagcattctgggacaacgcaaaacacgaaagtgaaacgggcaatgatatatatgtcttgggtgcgttacaaggcatcgtttgcaactgttgagttggataagtcaactgtcttcttttcctttggttgtagtagctgccttttttttcctttgttgctttaagaaatagcccgaaaaaaagaatgttctacatttcggagcagaaaactaaccgaatgagtttttggtcggatcatcggatcgatcagatatattttgagttacgaactgttataaaaaaagccataattttgtgttgagtttgcaaaataccttataacttgttatttgagattgcacctccatatatattaattcgtaagagtatttattaagtaagctttagtataaatccttttttcctttaaagtaagttaatgttctactaaataatagtaaagttgaagaaccgctccgtttttacaccatgcacgtgttatctaacaaagaaaatatggtacacctaatggctaatgcaaaggacaacacaatgaaactaacttgactctgtgttatagaaacccatagacatctgcatacatcctagtatttgtataaattggactcaaattcctgaggacaatcatagcaaacaatcacatcatcgcaatatacataaacaaaagaggaagaaaaa

SEQ ID NO: 296 - DNA, 1003 bp, Arabidopsis thaliana
  misc_feature (1)..(1003): Ceres Promoter YP0107
taacaatccttgggaacattgcatccatagatatccggttaagatcgatctttgaactcataaaaactagtagattggttggttggtttccatgtaccagaaggcttaccctattagttgaaagttgaaactttgttccctactcaattcctagttgtgtaaatgtatgtatatgtaatgtgtataaaacgtagtacttaaatgactaggagtggttcttgagaccgatgagagatgggagcagaactaaagatgatgacataattaagaacgaatttgaaaggctcttaggtttgaatcctattcgagaatgtttttgtcaaagatagtggcgattttgaaccaaagaaaacatttaaaaaatcagtatccggttacgttcatgcaaatagaaagtggtctaggatctgattgtaattttagacttaaagagtctcttaagattcaatcctggctgtgtacaaaactacaaataatctattttagactatttgggccttaactaaacttccactccattatttactgaggttagagaatagacttgcgaataaacacattccccgagaaatactcatgatcccataattagtcggagggtatgccaatcagatctaagaacacacattccctcaaattttaatgcacatgtaatcatagtttagcacaattcaaaaataatgtagtattaaagacagaaatttgtagacttttttttggcgttaaaagaagactaagtttatacgtacattttattttaagtggaaaaccgaaattttccatcgaaatatatgaatttagtatatatatttctgcaatgtactattttgctattttggcaactttcagtggactactactttattacaatgtgtatggatgcatgagtttgagtatacacatgtctaaatgcatgctttgtaaaacgtaacggaccacaaaagaggatccatacaaatacatctcatagcttcctccattattttccgacacaaacagagca

SEQ ID NO: 297 - DNA, 1024 bp, Arabidopsis thaliana
  misc_feature (1)..(1024): Ceres Promoter YP0110
gggatgcggttccgcttcctcttgatcttggacgagtcggaggacattgttggatcccagtgcaatggtaatataaaacaagaaaacaagagattttataggacaatcactaaatgacatttaattgattaaacatttattcattaataattgtatgttactaacttcaacatttaataattttgtttaagatacgtttacatcagagactattaatatttttacaggttgtaactttaaactttgtcttgaatcgaacatgactatagattttgggcaaacttaaagataacaacatttccgttttttttcaaattattacaaatcaaactgatatattagacacaacacgattacacgtaatgaaaaaagaaaaagataaaaagataaaagaagggatcgattctgtttggtctggtttagtgagattcaaagttaagctcttcctttcaagacatgccttcttaaaccgggaatgtgaacgtttgtaatgtagtccgtccagttaatgcttccaacatcaaatccaaattctctcttctcgtcctctgacatattctccattaatctctggggtattgctgttatcaaatctgtaaaagaaaccaaaaaaaaaagatgaaaactttgcgggtaccggttttgtctgctctaagaattagaatgttaatgagttctgtcttaccttccaccatagaaagtgtatggctcataaatagtagcaaggtgtttggcttgttcaacagatttcttgcatataaactttagcttctgcatcatcttactatccactgaactcataccactcatcaacccactccgttcttgagcatctctccacaaatgatccgagaaatcatcaacggaattgaaaagtttcatcaaacgcaccataataggatcacctttagagtccatgcatggagatgttttgtagtggttataaagaagctccgctaagtcttcgaaaaccagcgggtttatcgccgaagaagcgatctgatacacgtttatttcaggttcc

SEQ ID NO: 298 - DNA, 1024 bp, Arabidopsis thaliana
  misc_feature (1)..(1024): Ceres Promoter YP0111
cgattggatttagtctatacattatagggcgcaagtttgtggatttaagaattatataaaaacttgaaatatatagtttttatgcattctcctcttgtgtaatacataaaccaaatatgagataggttaatctgtatttcagataatattaaattccaaacaatatttttacttgttataagaaggcaattaatatctctctgttaatggcaagtggtaccaagtagtattaaactattaatgcaatggaagagtactgttggaaattataatcctctatcacacattcaaacagatctcctgaaatcttctcttccaaacttgtacttctctgatccaaatgtaggctccaaaatatagacatttaccatttactaagtccacaactcctttcttgtctccttcaaaaatgactcttgtgtaaccaccatatgactccgacagttcggcattgccatgatgagagcttaaaaattcaccttcctgagcatttcaagtcttcactcccttagcttgacctgaaccaagataaaatgcctttgtcgtcccgtaatatccatcctgctttggacggcatcatagttacattcgatccatcctatttacaatgttattttagtattaaaaacatgacaataaatttgttgttaaacatattcaaatacaatatgattggatttataagtaattgtaatatgaaatgtccttagtaatatgttaaaaaatacatagatacacacacgtactaaaagaggcaacgcgggagatgtcattagaggaagaactaggaagcagagcgttcatgcaaaatgctaccaaaaacgttaatgcaatatctcaactaatcagcacagtccatttcatactgagaatgtaaaaaccaatcagcatcgtccattttttcatctaattatttgttaactcttaattggccacaacttccaaccacatgacgctctttctattccctttatatattcccatctcaaatgttcttggagacacaaaatatcataaacatata

SEQ ID NO: 299 - DNA, 996 bp, Arabidopsis thaliana
  misc_feature (1)..(996): Ceres Promoter YP0115
gtcgattggatgatgaacattctacatatataattattatgtttaagcacttagacagcataaattctttctaattatataaatctaaccttgttacattgtacatctataaattacttgaagaaataacgagttctatttctttttaaaaattaaaaatactataccatatctcagtgattaagttgaaccaaaaggtacggaggagaaacaagcatttgattcttccttattttattttattcatctctcactaatgatggtggagaaaaaaagaaaatacctaacaaacaaatatatattgtcatacaaaaatatttctatatttttagttaattagtttatattcctcacttttcagggcttatataagaaagtgagcaaacacaaatcaaaatgcagcagcaaatactatcatcacccatctccttagttctattttataattcctcttctttttgttcatagctttgtaattatagtcttatttctctttaaggctcaataagaggaggtactattactacacttctctctacttttacttgtattttagcattaaaatcctaaaatccgttttaaattcaaaaataaacttagagatgtttaatctcgattcggtttttcggctttaggagaataattatatgaaattagtatggatatctttactagtttccattcaaatgattctgatttcaatctaatactctcactctttaattaaactatatgtagtgtaatttcacactgttaaatttctaccatgtcatgtatattagagttgcatagaaaattgtaaaacatccatttgaattcgaatgaaacaaaatgttttaaaataaaattttggtttttaaaagaaaaatctaaaactgaattatatcgtttaaccaagttgtaaaagtcataaaacgtagtatcttgtaaatcgctcttccacggtccaaatagacttctagtaataaacaagtaaaactaattttggtttcttac

SEQ ID NO: 300 - DNA, 1024 bp, Arabidopsis thaliana
  misc_feature (1)..(1024): Ceres Promoter YP0117
gtcagtgagtcgattggatcacagtcctttatgataaaacaaactcataattattccaccgacaacatgcgttttaaattattttttcttaaattatattatattatattgatatcaacctagctaaaataattcggatggcgaaatcggacaatttttaatagaaaaaatgggtatgaagatagtctatgattccgttcttagcgactagagggacctgctcaaatctcccgggtgatacgcgatgtcaagctcaatagaaccccacaaccgacgagaccgagaaatccttgatttgggctagaagattttgaaataaatttaatatattctaagtaacttgcttaaattttttttcaaactctaaagacataactaacataaagtaaaaaaaaaaaagttaatacatgggaagaaaaaaattaaactaatgattagctctctaacgtgtttaatctcgtatcaagtttttttttaaaaattatattgctattaaaacattgtactattgtttctattttgtttagctattattcttgtgaaatgaaaagttgtgtttattcaattactaaatggcaatatttatcttggaaaactatacctctaattggattaggccctagacatcctctttagcttattgacgttaaaattattcccaaaactattaaagtttagtagtttgaaagatgcatcaagacctactcagataggtaaaagtagaaaactacagttagtgtgattatattttaaaatatataaaacaatcttattaaactaaatattcaagatatatactcaaatggaagataaaaacatttagtctgttaccactaccagcctagctagtcactaatagtcactttggaactgagtagatatttgcatcttgagttaccatggactcaaaagtccaaaaagagaccccgagtgaaaatgctaccaacttaataacaaagaagcatttacagcggtcaaaaagtatctataaatgtttacacaacagtagtcataagcaccattg

SEQ ID NO: 301 - DNA, 1000 bp, Arabidopsis thaliana
  misc_feature (1)..(1000): Ceres Promoter YP0119
taccaaaaataaggagtttccaaaagatggttctgatgagaaacagagcccatccctctccttttccccttcccatgaaagaaatcggatggtcctccttcaatgtcctccacctactcttctcttctttctttttttctttcttattattaaccatttaattaatttccccttcaatttcagtttctagttctgtaaaaagaaaatacacatctcacttatagatatccatatctatttatatgcatgtatagagaataaaaaagtgtgagtttctaggtatgttgagtatgtgctgtttggacaattgttagatgatctgtccatttttttcttttttcttctgtgtataaatatatttgagcacaaagaaaaactaataaccttctgttttcagcaagtagggtcttataaccttcaaagaaatattccttcaattgaaaacccataaaccaaaatagatattacaaaaggaaagagagatattttcaagaacaacataattagaaaagcagaagcagcagttaagtggtactgagataaatgatatagtttctcttcaagaacagtttctcattacccaccttctcctttttgctgatctatcgtaatcttgagaactcaggtaaggttgtgaatattatgcaccattcattaaccctaaaaataagagatttaaaataaatgtttcttctttctctgattcttgtgtaaccaattcatgggtttgatatgtttcttggttattgcttatcaacaaagagatttgatcattataaagtagattaataactcttaaacacacaaagtttctttattttttagttacatccctaattctagaccagaacatggatttgatctatttcttggttatgtattcttgatcaggaaaagggatttgatcatcaagattagccttctctctctctctctagatatctttcttgaatttagaaatctttatttaattatttggtgatgtcatatataggatcaa

SEQ ID NO: 302 - DNA, 999 bp, Arabidopsis thaliana
  misc_feature (1)..(999): Ceres Promoter YP0120
tagtttttgatttaatctacgtttttcttaatcataaatgggtaattattagtttttgcaaaatcaaaatccaaaaattgttctaaacactgcaaccatttaaggcctatatcactcagaaaatttctggtgggagaactaatcgtttgtcctttctaaatctcacatattagaatttagaattagtgtgctacataagaatattagttcagctcggaacaactattttttggtaaaacagagaacttaaacaaatgcattattttatcaacatgcattttgaattgaatataaaatttcataattgtaaagacataaattacataaaattttacatgaaaaaatagatatagaaagaaaatgaaactaactgatgatatgctctctaaattttttaatctcataacaagaattcaaattaattagttcatatttttggttaatataacatttacctgtctaagttggaactttcatttttttctgttttgtttagtcagtattcttaatgtgaaacggaaagttgaatttattcaaacttaaattcaatagcattaattaaaggcgaaagctattatctctacatgtggttcaaactagacatccaatttaattagcttattgacgttgaaatgttttccaaaactactatagtttggcaatttgaaagatgcatcagaactactcagacaggtaaaagtagaacctctagctgtgtgaattgtatgttagtccataaagaacatcttgtaaacttcatacttaagatatatattacaatatatacttgaatggtagataaaaacgattagtctgattgctagcatactcacaactatttggaaatgagtaagatattggcattctagagttactactatggagacaaaagtcgaataaaagagacctcacgtgaaaatgttacgagctagtaaaaaaagcatttacactaacggtaaaaaaagtatctataaatgtttacacaaggtagtagtcatt

SEQ ID NO: 303 - DNA, 999 bp, Arabidopsis thaliana
  misc_feature (1)..(999): Ceres Promoter YP0121
ttggattttttttttgttgagtcagcagaccatctaatctctctttttccaccacagcctgctttctatgaagcatttgggcttacggttgtggaatcaatgacttgtgcactcccaacgtttgctacctgtcatggtggacccgcagagattatcgaaaacggagtttctgggttccacattgacccatatcatccagaccaggttgcagctaccttggtcagcttctttgagacctgtaacaccaatccaaatcattgggttaaaatctctgaaggagggctcaagcgaatctatgaaaggttggcccattctccttgacaggcttaacaatacaacttgtatcgcttcaacaagatgatggcttaataaggatttttgcatgtataggtacacatggaagaagtactcagagagactgcttaccctggctggagtctatgcattctggaaacatgtgtctaagctcgaaaggagagaaacacgacgttacctagagatgttttactcattgaaatttcgtgatttggttagtgtaacccactgttattcttttgatgtctacatctactttacttacattattcttttcttcggtttgcaggccaattcaatcccgctggcaacagatgagaactgatcatgacagggtaggattttatttcctgcactttctttagatcttttgtttgtgttatcttgaataaaaattgttgggttttgtttccttcagtggtttgattttggacttatttgtgttaatgttgttttggctgttctcttaatatcaataacaaataaatttactggttggtatctaagatctaacaatagttactatttttagaggtaaagacaccaaccttgttatattggtcagagagctaaaaccttgacttgttgggaaaacaaaactctaatgacagaaaatctgacatgatgccttataattcacagcctcatgttctacataaatcctaacaatagcactttgtttct

SEQ ID NO: 304 - DNA, 1004 bp, Arabidopsis thaliana
  misc_feature (1)..(1004): Ceres Promoter YP0128
gataaactgataatggaaaagaacaaagaaaccagtttttaactatttgcatatgtaatttatttgttgcaaattatatttagttaaaatgtttcctctatttatatatatatatatcagtcaagcactatgtataagaaatgtcaatttataaatttttacatgtcctttaacagaaagaaaatgaatttttacatgtcattcatagagagtcactcgtttatttcttatatagagaataacacactcacatgcatatgcatgcaatatgatacattttatgacaaagataatcaacggaaacggtcaagacataatttgataaacaacttgcacgatgcacagatctgatcaaatatataactctttaacatatccaaaatattcaaaaagaaaaactcgatccaaactagcaacatcacgctcacgcggtaggctaaaaatttattaatctccaaaagtctttcttatgaacactgcaaacacaacaacttgaaaagtcatataggtttagatgatgacgcgtattggctatcgcttaccggagtggctcataaatacaataaacaatacgtaaaagtcaaagtcaaatatatttagtcaactataaccattaatcgggcaaaacctttagctgtcaaaacaacgtgaaaacgatatttgtatatatcatcaagaatcagtagataagagaatgatttaatcccctgactattacaattttggtgtaataaacagtctctattggtttttattctttgttttaatttctcatgacctatagagagaattaggtagtttcgaaaattggctaatcaacttttgaaaactactgtctactttgcttaaattctctacacttagtttcggataagataattgtcggactaatagttaatcccttgacaatctttgatattataaaaggtttagttaatctcttctctatataaatattcatacaccagctttcaaaaatatataatccaaacaccaaaaacaaa

SEQ ID NO: 305 - DNA, 1001 bp, Arabidopsis thaliana
  misc_feature (1)..(1001): Ceres Promoter YP0137
gtggcacatgctgaaaccccgagcatctctccggaagacacgcgtcgttcgctccaaagaaaacagtcacagctgccggagaatctccgccgtcttcttctgccaccggaaaaactctctccaccactttcagtgcccacctcgtgttatatccactgtatcctcgtagcaccatatcagcctaataaaattttatgtatcaaattttaagacatagccgaaactacactatactagacaataataatatgatttgtttcctgaaaaattatggtttcatgagaaacattaatcatctataaaacaaattagctatggcatcgaagagttatcaatcaaaactgatgaatctttacttaatatatacaacatatctttaccttgcggcggagaagatcggcgagagaagcaccccagccaccgtcactaaaggattcttcagtgatggaatcaccaaagagaaaaaccttccgtctcatcatcttccacacaatcttcttgagaaaatctgagagataagaaaggtgtagtggttttgctgaagtgatcgtgtttgatttagtaaagaaatgctttatttattgttgggggaaacataaataaataaagtaaaagtggatgcactaaatgctttcacccactaatcaccgacctttcatggtttattgtgaaatacactcatagatagacatacaataccttatgtacgtaaataacattttatttgtcgacacttatgtaagtaacgcatagattattttctatgtgattgccactctcagactctcagtttcaaccaataataacaataactacaacaacattaatcataaacatatgctctggtttacaattaaagcttagattaagaaactgtaacaacgttacagaaaaaaaatgttatttacgttttgtaagattagtctctagaatcatcaccgttttttatatattaatgattctttcttatatataaaacctttctcgaaatacccatgaaa

SEQ ID NO: 306 - DNA, 1001 bp, Arabidopsis thaliana
  misc_feature (1)..(1001): Ceres Promoter YP0143
atacaacagatggcagatatcgagttaaatacgtgaatcagccgttacgatattttaaaactagaaaattatttaaaaatattgcaaaataccatttaatttcattgttcataaaaaaaagaaattcaaaaacttaaaaactgattcaaaaatttggattaattctcattaacagtcttcaacactacaacaacatgtttctaatttattttatattttaataattaaacaatatatacgtctgcacattgttgctccgacataatctagtataaaaatagttgcagcatatgtgaaaagcaagcagcatttatcactcaatacttttaattttatctgttgtatgtattaaggttttgtagctttaagaaaacgcttataatataaaataacttctaaaagatatttcatgcgtatacaataaatatttgtgaaaaaacatttcgaaaacgtgtacaatatataaactattgtgttatcttttgacattcaaacaaatgttgacaatgtaattttatccatgatatgattggccaattagctgcgaggtaaaaatccgtatacgagtaaaagtaagataaaatttcgcaagaagatttttagcaggaaatctaagacaagtgtcatgaacgtgtcaatcaacaaacgaaaaggagaattatagaatccagattcgacgtaccacattaataaatatcaaaacattttatgttattttatttttgctctggcagttacactctttttcattgctccaataaaaaaatcactcgcatgcatgcatatatatacaccatagtaaactccgcctcttcttcattttaaaagtatcagtttacactgacacaatccttaactattttcctttgttcttcttcatctttattacacatttttttcaaggtaacaaataatctttttaagtcacttttatactctttaaatcttagattgatatatgaatgcatgttaatatttcaagatttataggtctaccaaac

SEQ ID NO: 307 - DNA, 1003 bp, Arabidopsis thaliana
  misc_feature (1)..(1003): Ceres Promoter YP0144
aaacgttgcaagattattgattgtgagaaagagtgctcaaggtagtactgatttctgtaaagctcacggtggtgggaaacgatgttcttggggagatgggaaatgtgagaaaatttgctagaggaaagaagcggtttatgcgctgcgcataacactattatgtctcgggagaacaaagatggaagcaagagcggtttgattggaccgggactctttagtggccttgtttttggctctacttctgatcattctcagtctggagctagcgctgtctctgattgtactgattctgttgaacgaatacagtttgagaataggcagaagaacaagaagatgatgataccgatgcaggttctagtaccttcatcaatgaaatctccaagtaattcacatgaaggagaaacaaacatctatgacttcatggttccggaggagagagttcacggcggtgggctagtaatgtctttacttggtggctccattgatcgaaactgaaagccatttatggtaaaagtgtcacattctcagcaaaaacctgtgtaaagctgtaaaatgtgtgggaatctccgaatctgtttgtagccggttacgttatgctggatcaaaaactcaagatttgttggatattgttatgctggatcggtggtgaaaccacttcccggttgctaaataaataaacgtttttgttttataatctttttcactaaacggcagtatgggcctttagtgggcttcctttaagcgaccaatacaatcgtcgcaccggaatctactaccatttataggtttattcatgtaaaacctcggaaaatttgagagccacaacggtcaagagacaaaaacaacttgaagataaagggataaggaaggcttcctacatgatggacaacatttctttccacacaaattctcataataaaaatcttataatacaaatacttacgtcataatcattcaatctagtccccatgttttaaggtcctgtttcttgtctgatacaaat

SEQ ID NO: 308 - DNA, 1004 bp, Arabidopsis thaliana
  misc_feature (1)..(1004): Ceres Promoter YP0156
ttggtttgcattgtgaagatttgtattaactatagaacattgaattgatggtgttaagttcttacacaagcgtgcttctcggtttgaactgtttcttttgtatgttgaatcagagcttagtttataggaaccagagtatctacttagtcattctctgatgctaagtgctaaggttctacctagttgccctctaggcccttatgttattgataacttatgaagctatttgaacacttgattcttaggagacctaagttggtacagccagatagagtgtatgttcttgttctctatgtgacaggatcaagctgccacacatagttcaagggtatgctctgtgtgggtttgctcagattgaggacaaatctatacaaggaagtagagtctttgacattttgatgttgtatgataagaagaagaaaggagagtaataaagaaagagaaaagggaaacagaaacacgtgggagaacatcccaaagaggaagcacacgcggatcttcatgcaaagctccccgattctcccatgtggtccctttctccctttgtccccctcctctttcttcttttctcattttactcctttttttaccattatacaacgaatcttttttatcataattttttggttttggtttattttccaataacactttcttggttacttcccattctcactttttcatataagaaactcactttgggaaacttatgtttgagaatgacaagtctttttagagaaagtgatgtaacaaatctaaagtgattatataataaccttgcacaatgtttttgattttttgtaagattcgaatattaggtttattattcgtagggaataaacttactttcaaaagcgttcataagttaatactttcatatatgatcataagtacggacactattgttttttgtttgtttgtgtttattctaaaagaaagtagcttttaattgaaatgtcctcggaggcacagtttaaagttcgagtgtaacagtttctaaggca

SEQ ID NO: 309 - DNA, 1000 bp, Arabidopsis thaliana
  misc_feature (1)..(1000): Ceres Promoter YP0158
ttattagattaatagattgcattgcattgcttgtgctttcaatttacaaattgtctcccaactccatcgacacatctctttttgtgtatataagattcagacttgttatattttttttataaatatgttattagcatcttaagttaaattgattttttatatctgcattaaggattacacgactatatttgcgattgtgtgttggttaaaatataatttaggattgtctttaactacatttaggattatatgactatatttggttaaatataaaatctagctgtgattattagtattcaaaaataagtagcctaaccaattaaaacaacggctattggggcaaattagaacattttagtgtgtccaaaatataatggtcattaggtcatattcctcctagcttcatcgcagcataattgaatgattgccttatttagaagagcttttccactttcccaaaatctaggtgggatctttttgttttgaccttcatttttcttgtttaccatttttagctaaattatttacgattacaaaagatatcaaaagttggatcataatacaatttatagacttactgtagaaaattcgtatgtacaagtacaacaaattcttcataataaattttgaaaattctattacaaatgttgtaagaaatagaatttgaaatatatataaactaaggagaaaaaaaaagagaacatgcattgctctagtcagagtggaccaacatcaacgagataagataacataaaaaccaactcaccataactaaaaacatcccaagagatccaacgattcatatcaaacacaaaaacatcgaacgatcagatttaaaccatctctggtatctccaaaacacaaacacttttttttttcttttgtctgaatggaacaaaagcatgcgacatctctgtgtctttatcttctctctcctcttcttgaaaaactgaacctttaattctttcttcacatctcctttagctttctgaagctgcta

SEQ ID NO: 310 - DNA, 1005 bp, Arabidopsis thaliana
  misc_feature (1)..(1005): Ceres Promoter YP0188
gattggtatgaaatttcggagaccaacaaaaaaaactttattgagcttggagtgaagctatatatatggggcaagatcataatatgtttatatcggccttttcgttaactgaaaataatagttttgagaaatatatcaaatggtaaacagacatcatctttgaaaaataccatcaatgaagttaatattgttattggcatatggtttacccatcttaattttaatgcaaccaaacaaacaagaaacaaaaactgtataagatacaaggtgttttacgattttccgtcttaaaaccgaaatatttttgttcctacgactttaaacggactttgcttaagttgtgtgcatgtaagctcgtcgtccctcgattgtcatcaacattcaccaatatcagcctctatcacacgagtgaaggtggtgattcggcttaatgaaaacagagaaatatttcaatatgattcctattaaattttaaatcttttttctcaatctctagattttcattaaaagcatcatgatttttttccactatgttcatatatctctatcacagttttaggtacattgtagaaattggataagatacgtcatacgtctaacatgaatttggtctagcaaggaaggtttgagataataagtgaaaagaaaacacaagataataaattataatttataaatgctttatagtattgaaaaataagatgattttttttttttttaataccggattggctgatccacttatgatgactcaaatgttattaagtttcaagacaatttatgatgacacaaatcacaatgagtcaatagtagccacgaagccagaaaaaaaaaatgtactacaaaaagataatgatagtacaaaatgatacgtcgtactgccacatgtacgacacaactcgattaccaaaaagcagagccatccaaccataaaactcaaaacacacagattccactggcgtgtgctctcctcacttcactcgtccttgaaacttgaggtactga

SEQ ID NO: 311 - DNA, 1002 bp, Arabidopsis thaliana
  misc_feature (1)..(1002): Ceres Promoter YP0190
taaatagtgacattggtaagaagaaaaaaaacactattaaatagtgaaaaaatggtttataactctcttaattaacattacttattattgctagcacctaaaatctcccacaaaatatttgttgtaaaacacaaatttacaaaatgattttgtttttaaattagtaacacatgttcatatatacgttaataagaacataccctatatgattttatataaaaaaatttctttgagacgtcttattcttttttctttaataatatgcaattgtgagagtttggatttgaatggtagcattagaagcaaacttgaaccaaacatatttcatgaagtcaaacttgaaccaatgtgatcactaatcacagtgttcgcagtgtaaggcatcagaaaatagaagaagggacatagctatgaatcatataatcttgacacatgttttataggttttaggtgtgtatgctaacaaaaaatgagacagctttcttctaatagacttaatatttgggctaaatgtaccacagttgtgaatttcttacaaaaatgggccgagctacaaaaaactacaggcccactctcaactcttatcaaacgacagcgttttacttttttaaaagcacacactttttgtttggtgtcggtgacggtgagtttcgtccgctcttcctttaaattgaagcaacggttttgatccgatcaaatccaacggtgctgattacacaaagcccgagacgaaaacgttgactattaagttaggttttaatctcagccgttaatctacaaatcaacggttccctgtaaaacgaatcttccttccttcttcacttccgcgtcttctctctcaatcacctcaaaaaaatcgatttcatcaaaatattcacccgcccgaatttgactctccgatcatcgtctccgaatctagatcgacgagatcaaaaccctagaaatctaaatcggaatgagaaattgattttgatacgaattagggatctgtgtgttgaggac

SEQ ID NO: 312 - DNA, 995 bp, Arabidopsis thaliana
  misc_feature (1)..(995): Ceres Promoter YP0212
agtcgattggtacactcttaatttaattagagtaagagatcaacaaaaatatagaattttctttatatcgaagtgctacgaccttatatatatagaaaaaaaagcataggtgaatctctaaattgagattgtgctgtagtaaacatattaagtttttagtttttttaagaaatgaatctttttgttgattaattcaaactagtagtcattaagattccggagattccaatttagaaaagtcaaagattcaaagaacaagtccaggtccacatgttgaatccgattcatcatccactcatccttcatatcttcctccaccgtctccgcccaaaaaatcaataacaataaaaaatcctaaaaaaacatatttgattttgaaaaaactttatcatatattatattaattaaatagttatccgatgactcatcctatggtcagggccttgctgtctctgacgtccttaattatcattatttttaaatttgtctctctcagaaaattacgccacaatcttcctctttcccttttccgaaaacagctaatatttgtggacctaaactaaataacgtagcctctagattttatataattactaatactatatgctactacttgttattatttactccaatcatatatgataccaatcaagaatcactacataagtagaaaactttgcaatgagtccattaattaaaattaagaataaacttaaaattttatggtattttaagattccctttggattgtaatgacaagaaatcagcaaattagtcgtaactcgtaagaataaacaagatcaatttttactttctttacaaagattccgttgtaattttagaaatttttttttgtcactgtttttttatagattaatttatctgcatcaatccgattaagaagtgtacacatgggcatctatatatatctaacaggtaaaacgtgtatgtacatgcataaggttttacgtgcttctataaatatatgtggcagt

SEQ ID NO: 313 - DNA, 1024 bp, Arabidopsis thaliana
  misc_feature (1)..(1024): Ceres Promoter YP0214
ccagtcgattggcgcctcgcatgcctatcatatttaaccgtcaataatggatttggcggttttggtaggccgggtcaaccggattaaaagaaaacggtttggagtccttccttgcaattgaattttcacacattcgggttttgtgatttctctgtcataatgggcccggcacatatggttcataacccatgtgggcctatggtataatttttccaattaaaactattgttaggtcgataaaacaaaaaacaataaaaacgagtggaatacacataccaaaaagaatgtgatgaacattagtaattttattttgatggttaatgaaaaacaaaataaatgcatcttggcatcttccgttggaaagcgcaaatagggcagattttcagacagatatcactatgatggggggtgagagaaagaaaacgaggcgtacctaatgtaacactacttaattagtcgttagttataggactttttttttgtttgggcctagttataggatcataaggtaaaaatgaagaatgaatattagattagtaggagctaatgatggagttaagtatgcacgtgtaagaactgggaagtgaaacctcctgtatggtgaagaaactatacaacaaagccctttgttggtgtatacgtattaatttttattcttttatcacaagcgatacgtatcttaagacataataaatatatatcttactcataataaatatcttaagatatatatacagtatacacctgtatatatataataaataggcatatagtagaaattaatatgagttgttgttgttgcaaatatataaatcaatcaaaagatttaaaacccaccattcaatcttggtaagtaacgaaaaaaaagggaagcaagaagaaccacagaaaagggggctaacaactagacacgtagatcttcatctgcccgtccatctaacctaccacactctcatcttctttttcccgtgtcagtttgttatataagctctcactctccggtatatttccccattgcactgga

SEQ ID NO: 314 - DNA, 911 bp, Arabidopsis thaliana
  misc_feature (1)..(911): Ceres Promoter YP0263
atctagctgtggattccaccaaaattctggcagggccatgatctaaaaactgagactgcgcgtgttgttttgcagtgatttgtatttcatatttgcaccatcctacacagtccacttggtatcgtaaccaaacataaggagaacctaattacattattgttttaatttcgtcaaactggtttttaccttttagttacatagttgattcttcatttgttttagtagttatggagcacaataatgtgcaacaaagaaagatcatagtggattaatatgttgagaggtcagaaattcttggttaacaaaaaaaagttacaaggactgagattttgggtgggagaaagccatagcttttaaaacatgattgaacttaaaagtgatgttatggtttgaggggaaaaaggttgatgtcaactaagatagttgaagtaatgtcttaaactaaagtaaaccaccggtccaaccgtggtccggaagcatctctggtatgatttatcctaaaaatcaaaatagtagaaacatactttaaatatatacattgatcggacgaaaattgtaaactagtatagtttcaaaaactagttgaacaggttatgtaccttaaacatttatttcaaacttaaacactaaagaacatatatgaatagaagtttatataaattactatatatctaccataaatctcttataattatgatgtcacgatgaggaagtgttgaaacgttaaaatgccaaaatataagcatgcgacggaattttggcagaagattgtagagttgtaatctgtcgcaatcattactcgtgctagcatttttcattttcccttcatttgtggataacgcacgatataacattctacacaccaacaagattctataaaaacgcaaaggttgtctccatagaatatcgtc

SEQ ID NO: 315 - DNA, 999 bp, Arabidopsis thaliana
  misc_feature (1)..(999): Ceres Promoter YP0275
aaacattaatatgtagtaactatgggcgtatgctttactttttaaaatgggcctatgctataattgaatgacaaggattaaacaactaataaaattgtagatgggttaagatgacttatttttttacttaccaatttataaatgggcttcgatgtactgaaatatatcgcgcctattaacgaggccattcaacgaatgttttaagggccctatttcgacattttaaagaacacctaggtcatcattccagaaatggatattataggatttagataatttcccacgtttggtttatttatctattttttgacgttgaccaacataatcgtgcccaaccgtttcacgcaacgaatttatatacgaaatatatatatttttcaaattaagataccacaatcaaaacagctgttgattaacaaagagattttttttttttggttttgagttacaataacgttagaggataaggtttcttgcaacgattaggaaatcgtataaaataaaatatgttataattaagtgttttattttataatgagtattaatataaataaaacctgcaaaaggatagggatattgaataataaagagaaacgaaagagcaattttacttctttataattgaaattatgtgaatgttatgtttacaatgaatgattcatcgttctatatattgaagtaaagaatgagtttattgtgcttgcataatgacgttaacttcacatatacacttattacataacatttatcacatgtgcgtctttttttttttttactttgtaaaatttcctcacttttaagacttttataacaattactagtaaaataaagttgcttggggctacaccctttctccctccaacaactctatttatagataacattatatcaaaatcaaaacatagtccctttcttctataaaggttttttcacaaccaaatttccattataaatcaaaaaataaaaacttaattagtttttacagaagaaaagaaaaca

SEQ ID NO: 316 - DNA, 981 bp, Arabidopsis thaliana
  misc_feature (1)..(981): Ceres Promoter YP0285
gggattatatatgatagacgattgtatttgcgggacattgagatgtttccgaaaatagtcatcaaatatcaaaccagaatttgatgtgaaaacactaattaaaacatataattgacaactagactatatcatttgttaagttgagcgttgaaagaaaatgaaagagtgtagactgtagtacgtatgagtttcccaaaagatggtgcttgaatattattgggaagagactttggttggttcggttgaatgaagatttttacctgccatgttgatagagaaaggcaaataaatgtaggggtcgatgtctaacgtaaagactggatcaaccaagagtcctcctcctcgtcttcaccaaaaaaaaagagtcctcctcgtggaaacttatttcttctccagccaagatctcatctcatctcttcactctatgaaatataaaggaatcttatggtttttctaaaaactatagtacgtctatataccaaaggaaacaatataaaatcagttaatctgataaattttgagtaaataataaagttaactttgtacttacctatatcaaactaattcacaaaataaagtaataataacaaagaatttttagtagatccacaatatacacacacactatgagaaatcataatagagaattttaatgattttgtctaactcatagcaacaagtcgctttggccgagtggttaaggcgtgtgcctgctaagtacatgggctctgcccgcgagagttcgaatctctcaggcgacgtttcttttgttttcggccataaaggaaaaagcccaattaacacgtctcgcttataagcccataaagcaaacaatgggctgtctctgtctcactcacacacgcgttttcctactttttgactatttttataaccggcgggtctgacttaattagggttttctttaataatcagacactctctcactcgtttcgtcaacattgaacacagacaaaaccgcgt

SEQ ID NO: 317 - DNA, 996 bp, Arabidopsis thaliana
  misc_feature (1)..(996): Ceres Promoter YP0286
gaaaacaatcataggttacgctattatcatcgaaaggtatgtgatgcatattcccattgaaccagatttccatatattttatttgtaaagtgataatgaatcacaagatgattcaatattaaaaatgggtaactcactttgacgtgtagtacgtggaagaatagttagctatcacgcatacatatatctatgaataagtgtgtatgacataagaaactaaaatatttacctaaagtccagttactcatactgatttcatgcatatatgtattatttatttatttttaataaagaagcgattggtgttttcatagaaatcatgatagattgataggtatttcagttccacaaatctagatctgtgtgctatacatgcatgtattaattttttccccttaaatcatttcagttgataatattgctctttgttccaactttagaaaaggtatgaaccaacctgacgattaacaagtaaacattaattaatctttatatgagataaaaccgaggatatatatgattgtgttgctgtctattgatgatgtgtcgatattatgcttgttgtaccaatgctcgagccgagcgtgatcgatgccttgacaaactatatatgtttcccgaattaattaagttttgtatcttaattagaataacatttttatacaatgtaatttctcaagcagacaagatatgtatcctatattaattactatatatgaattgccgggcacctaccaggatgtttcaaatacgagagcccattagtttccacgtaaatcacaatgacgcgacaaaatctagaatcgtgtcaaaactctatcaatacaataatatatatttcaagggcaatttcgacttctcctcaactcaatgattcaacgccatgaatctctatataaaggctacaacaccacaaaggatcatcagtcatcacaaccacattaactcttcaccactatctctcaatctctcgtttcatttcttgacgcgtgaaaa

SEQ ID NO: 318 - DNA, 1000 bp, Arabidopsis thaliana
  misc_feature (1)..(1000): Ceres Promoter YP0337
taatttttttatttttggaactaacacttattagtttaggtttccatcacctatttaattcgtaattcttatacatgcatataatagagatacatatatacaaatttatgatcatttttgcacaacatgtgatctcattcattagtatgcattatgcgaaaacctcgacgcgcaaaagacacgtaatagctaataatgttactcatttataatgattgaagcaagacgaaaacaacaacatatatatcaaattgtaaactagatatttcttaaaagtgaaaaaaaacaaagaaatataaaggacaattttgagtcagtctcttaatattaaaacatatatacataaataagcacaaacgtggttacctgtcttcatgcaatgtggactttagtttatctaatcaaaatcaaaataaaaggtgtaatagttctcgtcatttttcaaattttaaaaatcagaaccaagtgatttttgtttgagtattgatccattgtttaaacaatttaacacagtatatacgtctcttgagatgttgacatgatgataaaatacgagatcgtctcttggttttcgaattttgaactttaatagttttcttttttagggaaactttaatagttgtttatcataagattagtcacctaatggttacgttgcagtaccgaaccaattttttacccttttttctaaatgtggtcgtggcataatttccaaaagagatccaaaacccggtttgctcaactgataagccggtcggttctggtttgaaaaacaagaaataatctgaaagtgtgaaacagcaacgtgtctcggtgtttcatgagccacctgccacctcattcacgtcggtcattttgtcgtttcacggttcacgctctagacacgtgctctgtccccaccatgactttcgctgccgactcgcttcgctttgcaaactcaaacatgtgtgtatatgtaagtttcatcctaataagcatctcttaccacattaattaaaaa

SEQ ID NO: 319 - DNA, 1000 bp, Arabidopsis thaliana
  misc_feature (1)..(1000): Ceres Promoter YP0356
ttagttcattgaaacgtcaactttttacttgcaaccactttgtaggaccattaactgcaaaataagaattctctaagcttcacaaggggttcgtttggtgctataaaaacattgttttaagaactggtttactggttctataaatctataaatccaaatatgaagtatggcaataataataacatgttagcacaaaaaatactcattaaattcctacccaaaaaaaatctttatatgaaactaaaacttatatacacaataatagtgatacaaagtaggtcttgatattcaactattcgggattttctggtttcgagtaattcgtataaaaggtttaagatctattatgttcactgaaatcttaactttgttttgtttccagttttaactagtagaaattgaaatttttaaaaattgttacttacaataaaatttgaatcaatatccttaatcaaaggatcttaagactagcacaattaaaacatataacgtagaatatctgaaataactcgaaaatatctgaactaagttagtagttttaaaatataatcccggtttggaccgggcagtatgtacttcaatacttgtgggttttgacgattttggatcggattgggcgggccagccagattgatctattacaaatttcacctgtcaacgctaactccgaacttaatcaaagattttgagctaaggaaaactaatcagtgatcacccaaagaaaacattcgtgaataattgtttgctttccatggcagcaaaacaaataggacccaaataggaatgtcaaaaaaaagaaagacacgaaacgaagtagtataacgtaacacacaaaaataaactagagatattaaaaacacatgtccacacatggatacaagagcatttaaggagcagaaggcacgtagtggttagaaggtatgtgatataattaatcggcccaaatagattggtaagtagtagccgtctatatcatccatactcatcataacttcaacct

SEQ ID NO: 320 - DNA, 1000 bp, Arabidopsis thaliana
  misc_feature (1)..(1000): Ceres Promoter YP0374
aagacacccgtaaatgttgtcatgtagaagaaactagaaacgttaaacgcatcaaatcaagaaattaaattgaaggtaatttttaacgccgcctttcaaatattcttcctaggagaggctacaagacgcgtatttctttcgaattctccaaaccattaccattttgatatataataccgacatgccgttgataaagtttgtatgcaaatcgttcattgggtatgagcaaatgccatccattggttcttgtaattaaatggtccaaaaatagtttgttcccactactagttactaatttgtatcactctgcaaaataatcatgatataaacgtatgtgctatttctaattaaaactcaaaagtaatcaatgtacaatgcagagatgaccataaaagaacattaaaacactacttccactaaatctatggggtgccttggcaaggcaattgaataaggagaatgcatcaagatgatatagaaaatgctattcagtttataacattaatgttttggcggaaaattttctatatattagacctttctgtaaaaaaaaaaaaatgatgtagaaaatgctattatgtttcaaaaatttcgcactagtataatacggaacattgtagtttacactgctcattaccatgaaaaccaaggcagtatataccaacattaataaactaaatcgcgatttctagcacccccattaattaattttactattatacattctctttgcttctcgaaataataaacttctctatatcattctacataataaataagaaagaaatcgacaagatctaaatttagatctattcagctttttcgcctgagaagccaaaattgtgaatagaagaaagcagtcgtcatcttcccacgtttggacgaaataaaacataacaataataaaataataaatcaaatatataaatccctaatttgtctttattactccacaattttctatgtgtatatatatacccacctctctcttgtgtatttg

SEQ ID NO: 321 - DNA, 998 bp, Arabidopsis thaliana
  misc_feature (1)..(998): Ceres Promoter YP0377
tataaaccattcctataacaccatatttaaacataacaatgaattgcttggatttcaaactttattaaatttggattttaaattttaatttgattgaattatacccccttaattggataaattcaaatatgtcaactttttttttgtaagatttttttatggaaaaaaaaattgattattcactaaaaagatgacaggttacttataatttaatatatgtaaaccctaaaaagaagaaaatagtttctgttttcactttaggtcttattatctaaacttctttaagaaaatcgcaataaattggtttgagttctaactttaaacacattaatatttgtgtgctatttaaaaaataatttacaaaaaaaaaaacaaattgacagaaaatatcaggttttgtaataagatatttcctgataaatatttagggaatataacatatcaaaagattcaaattctgaaaatcaagaatggtagacatgtgaaagttgtcatcaatatggtccacttttctttgctctataacccaaaattgaccctgacagtcaacttgtacacgcggccaaacctttttataatcatgctatttatttccttcatttttattctatttgctatctaactgatttttcattaacatgataccagaaatgaatttagatggattaattcttttccatccacgacatctggaaacacttatctcctaattaaccttactttttttttagtttgtgtgctccttcataaaatctatattgtttaaaacaaaggtcaataaatataaatatggataagtataataaatctttattggatatttctttttttaaaaaagaaataaatcttttttggatattttcgtggcagcatcataatgagagactacgtcgaaaccgctggcaaccacttttgccgcgtttaatttctttctgaggcttatataaatagatcaaaggggaaagtgagatataatacagacaaaacaagagaaaaga

SEQ ID NO: 322 - DNA, 999 bp, Arabidopsis thaliana
  misc_feature (1)..(999): Ceres Promoter YP0380
acaagtaccattcacttttttacttttcaatgtatacaatcatcatgtgataaaaaaaaaaatgtaaccaatcaacacactgagatacggccaaaaaatggtaatacataaatgtttgtaggttttgtaatttaaatactttagttaagttatgattttattatttttgcttatcacttatacgaaatcatcaatctattggtatctcttaatcccgctttttaatttccaccgcacacgcaaatcagcaaatggttccagccacgtgcatgtgaccacatattgtggtcacagtactcgtcctttttttttcttttgtaatcaataaatttcaatcctaaaacttcacacattgagcacgtcggcaacgttagctcctaaatcataacgagcaaaaaagttcaaattagggtatatgatcaattgatcatcactacatgtctacataattaatatgtattcaaccggtcggtttgttgatactcatagttaagtatatatgtgctaattagaattaggatgaatcagttcttgcaaacaactacggtttcatataatatgggagtgttatgtacaaaatgaaagaggatggatcattctgagatgttatgggctcccagtcaatcatgttttgctcgcatatgctatcttttgagtctcttcctaaactcatagaataagcacgttggttttttccaccgtcctcctcgtgaacaaaagtacaattacattttagcaaattgaaaataaccacgtggatggaccatattatatgtgatcatattgcttgtcgtcttcgttttcttttaaatgtttacaccactacttcctgacacgtgtccctattcacatcatccttgttatatcgttttacttataaaggatcacgaacaccaaaacatcaatgtgtacgtcttttgcataagaagaaacagagagcattatcaattattaacaattacacaagacagcgagattgtaaaagagtaagagagagag

SEQ ID NO: 323 - DNA, 1000 bp, Arabidopsis thaliana
  misc_feature (1)..(1000): Ceres Promoter YP0381
cacggtcaaagtattgctaacatggtcattacattgaaaaagaaaattaattgtctttactcatgtttattctatacaaataaaaatattaaccaaccatcgcactaacaaaatagaaatcttattctaatcacttaattgttgacaattaaatcattgaaaaatacacttaaatgtcaaatattcgttttgcatacttttcaatttaaatacatttaaagttcgacaagttgcgtttactatcatagaaaactaaatctcctaccaaagcgaaatgaaactactaaagcgacaggcaggttacataacctaacaaatctccacgtgtcaattaccaagagaaaaaaagagaagataagcggaacacgtggtagcacaaaaaagataatgtgatttaaattaaaaaacaaaaacaaagacacgtgacgacctgacgctgcaacatcccaccttacaacgtaataaccactgaacataagacacgtgtacgatcttgtctttgttttctcgatgaaaaccacgtgggtgctcaaagtccttgggtcagagtcttccatgattccacgtgtcgttaatgcaccaaacaagggtactttcggtattttggcttccgcaaattagacaaaacagctttttgtttgattgatttttctcttctctttttccatctaaattctctttgggctcttaatttctttttgagtgttcgttcgagatttgtcggagattttttcggtaaatgttgaaattttgtgggatttttttttatttctttattaaacttttttttattgaatttataaaaagggaaggtcgtcattaatcgaagaaatggaatcttccaaaatttgatattttgctgttttcttgggatttgaattgctctttatcatcaagaatctgttaaaatttctaatctaaaatctaagttgagaaaaagagagatctctaatttaaccggaattaatattctccgaccgaagttattatgttgcaggct

SEQ ID NO: 324 - DNA, 999 bp, Arabidopsis thaliana
  misc_feature (1)..(999): Ceres Promoter YP0384
tttaaaaaattggataaaacaccgataaaaattcacatttgcaaattttattcagtcggaatatatatttgaaacaagttttgaaatccattggacgattaaaattcattgttgagaggataaatatggatttgttcatctgaaccatgtcgttgattagtgattgactaccatgaaaaatatgttatgaaaagtataacaacttttgataaatcacatttattaacaataaatcaagacaaaatatgtcaacaataatagtagtagaagatattaattcaaattcatccgtaacaacaaaaaatcataccacaattaagtgtacagaaaaaccttttggatatatttattgtcgcttttcaatgattttcgtgaaaaggatatatttgtgtaaaataagaaggatcttgacgggtgtaaaaacatgcacaattcttaatttagaccaatcagaagacaacacgaacacttctttattataagctattaaacaaaatcttgcctattttgcttagaataatatgaagagtgactcatcagggagtggaaaatatctcaggatttgcttttagctctaacatgtcaaactatctagatgccaacaacacaaagtgcaaattcttttaatatgaaaacaacaataatatttctaatagaaaattaaaaagggaaataaaatatttttttaaaatatacaaaagaagaaggaatccatcatcaaagttttataaaattgtaatataatacaaacttgtttgcttccttgtctctccctctgtctctctcatctctcctatcttctccatatatacttcatcttcacacccaaaactccacacaaaatatctctccctctatctgcaaattttccaaagttgcatcctttcaatttccactcctctctaatataattcacattttcccactattgctgattcatttttttttgtgaattatttcaaacccacataaaaaaatctttgtttaaatttaaaacca

SEQ ID NO: 325 - DNA, 998 bp, Arabidopsis thaliana
  misc_feature (1)..(998): Ceres Promoter YP0385
actcaacaataggacaagccaaaaaaattccaattattgtgttactctattcttctaaatttgaacactaatagactatgacatatgagtatataatgtgaagtcttaagatattttcatgtgggagatgaataggccaagttggagtctgcaaacaagaagctcttgagccacgacataagccaagttgatgaccgtaattaatgaaactaaatgtgtgtggttatatattagggacccatggccatatacacaatttttgtttctgtcgatagcatgcgtttatatatatttctaaaaaaactaacatatttactggatttgagttcgaatattgacactaatataaactacgtaccaaactacatatgtttatctatatttgattgatcgaagaattctgaactgttttagaaaatttcaatacacttaacttcatcttacaacggtaaaagaaatcaccactagacaaacaatgcctcataatgtctcgaaccctcaaactcaagagtatacattttactagattagagaatttgatatcctcaagttgccaaagaattggaagcttttgttaccaaacttagaaacagaagaagccacaaaaaaagacaaagggagttaaagattgaagtgatgcatttgtctaagtgtgaaaggtctcaagtctcaactttgaaccataataacattactcacactccctttttttttctttttttttcccaaagtaccctttttaattccctctataacccactcactccattccctctttctgtcactgattcaacacgtggccacactgatgggatccacctttcctcttacccacctcccggtttatataaacccttcacaacacttcatcgctctcaaaccaactctctcttctctcttctctcctctcttctacaagaagaaaaaaaacagagcctttacacatctcaaaatcgaacttactttaaccaccaaatactgattgaacacacttgaaa

SEQ ID NO: 326 - DNA, 1000 bp, Arabidopsis thaliana
  misc_feature (1)..(1000): Ceres Promoter YP0396
catagtaaaagtgaatttaatcatactaagtaaaataagataaaacatgttatttgaatttgaatatcgtgggatgcgtatttcggtatttgattaaaggtctggaaaccggagctcctataacccgaataaaaatgcataacatgttcttccccaacgaggcgagcgggtcagggcactagggtcattgcaggcagctcataaagtcatgatcatctaggagatcaaattgtatgtcggccttctcaaaattacctctaagaatctcaaacccaatcatagaacctctaaaaagacaaagtcgtcgctttagaatgggttcggtttttggaaccatatttcacgtcaatttaatgtttagtataatttctgaacaacagaattttggatttatttgcacgtatacaaatatctaattaataaggacgactcgtgactatccttacattaagtttcactgtcgaaataacatagtacaatacttgtcgttaatttccacgtctcaagtctataccgtcatttacggagaaagaacatctctgtttttcatccaaactactattctcactttgtctatatatttaaaattaagtaaaaaagactcaatagtccaataaaatgatgaccaaatgagaagatggttttgtgccagattttaggaaaagtgagtcaaggtttcacatctcaaatttgactgcataatcttcgccattaacaacggcattatatatgtcaagccaattttccatgttgcgtacttttctattgaggtgaaaatatgggtttgttgattaatcaaagagtttgcctaactaatataactacgactttttcagtgaccattccatgtaaactctgcttagtgtttcatttgtcaacaatattgtcgttactcattaaatcaaggaaaaatatacaattgtataattttcttatattttaaaattaattttgatgtattacccctttataaataggctatcgctacaacaccaataac

SEQ ID NO: 327 - DNA, 1514 bp, Arabidopsis thaliana
  misc_feature (1)..(1514): Ceres Promoter p13879
tttcgatcctcttcttttttaggtttcttgatttgatgatcgccgccagtagagccgtcgtcggaagtttcagagattaaaaccatcaccgtgtgagttggtagcgaattaacggaaagtctaagtcaagattttttaaaaagaaatttatgtgtgaaaagaagccgttgtgtatatttatataatttagaaaatgtttcatcattttaattaaaaaattaataatttgtagaagaaagaagcattttttatacataaatcatttaccttctttactgtgtttttcttcacttacttcatttttacttttttacaaaaaagtgaaaagtaaattacgtaattggtaacataaattcactttaaatttgcatatgttttgttttcttcggaaactatatcgaaaagcaaacggaaagaacttcacaaaaaaccctagctaactaaagacgcatgtgttcttcttattcttcatatatcctctgtttcttgtgttctgttttgagtcttacattttcaatatctgactctgattactatatctaaaagggaacatgaagaacttgagaccatgttaaactgtacaatgccttcaaacatggctaactaaagatacattagatggctttacagtgtgtaatgcttattatctttaggttttttaaatcccttgtattaagttatttaccaaattatgttcttgtactgcttattggcttggttgttgtgtgctttgtaaacaacacctttggctttatttcatcctttgtaaacctactggtctttgttcagctcctcttggaagtgagtttgtatgcctggaacgggttttaatggagtgtttatcgacaaaaaaaaaatgtagcttttgaaatcacagagagtagttttatattcaaattacatgcatgcaactaagtagcaacaaagttgatatggccgagttggtctaaggcgccagattaaggttctggtccgaaagggcgtgggttcaaatcccactgtcaacattctctttttctcaaattaatatttttctgcctcaatggttcaggcccaattatactagactactatcgcgactaaaatagggactagccgaattgatccggcccagtatcagttgtgtatcaccacgttatttcaaatttcaaactaagggataaagatgtcatttgacatatgagatatttttttgctccactgagatatttttctttgtcccaagataaaatatcttttctcgcatcgtcgtctttccatttgcgcattaaaccaaaaagtgtcacgtgatatgtccccaaccactacgaattttaactacagatttaaccatggttaaaccagaattcacgtaaaccgactctaaacctagaaaatatctaaaccttggttaatatctcagcccccttataaataacgagacttcgtctacatcgttctacacatctcactgctcactactctcactgtaatcccttagatcttcttttcaaatttcaccattgcactggatg

SEQ ID NO: 328 - DNA, 1954 bp, Arabidopsis thaliana
  misc_feature (1)..(1954): Ceres Promoter p326
gtgggtaaaagtatccttctttgtgcatttggtatttttaagcatgtaataagaaaaaccaaaatagacggctggtatttaataaaaggagactaatgtatgtatagtatatgatttgtgtggaatataataaagttgtaaaatatagatgtgaagcgagtatctatcttttgactttcaaaggtgatcgatcgtgttctttgtgatagttttggtcgtcggtctacaagtcaacaaccaccttgaagttttcgcgtctcggtttcctcttcgcatctggtatccaatagcatacatataccagtgcggaaaatggcgaagactagtgggcttgaaccataaggtttggccccaatacggattccaaacaacaagcctagcgcagtcttttgggatgcataagactaaactgtcgcagtgatagacgtaagatatatcgacttgattggaatcgtctaagctaataagtttaccttgaccgtttatagttgcgtcaacgtccttatggagattgatgcccatcaaataaacctgaaaatccatcaccatgaccaccataaactcccttgctgccgctgctttggcttgagcaaggtgtttccttgtaaagctccgatctttggataaagtgttccactttttgcaagtagctctgacccctctcagagatgtcaccggaatcttagacagaacctcctctgccaaatcacttggaagatcggacaatgtcatcatttttgcaggtaatttctccttcgttgctgctttggcttgagcacggtgcttctttgtaaagctccgatctttggataagagcggatcggaatcctctaggaggtgccagtcccttgacctattaatttatagaaggttttagtgtattttgttccaatttcttctctaacttaacaaataacaactgcctcatagtcatgggcttcaaattttatcgcttggtgtatttcgttatttgcaaggccttggcccattttgagcccaataactaaatctagccttttcagaccggacatgaacttcgcatattggcgtaactgtgcagttttacctttttcggatcagacaagatcagatttagaccacccaacaatagtcagtcatatttgacaacctaagctagccgacactactaaaaagcaaacaaaagaagaattctatgttgtcattttaccggtggcaagtggacccttctataaaagagtaaagagacagcctgtgtgtgtataatctctaattatgttcaccgacacaatcacacaaacccttctctaatcacacaacttcttcatgatttacgacattaattatcattaactctttaaattcactttacatgctcaaaaatatctaatttgcagcattaatttgagtaccgataactattattataatcgtcgtgattcgcaatcttcttcattagatgctgtcaagttgtactcgcacgcggtggtccagtgaagcaaatccaacggtttaaaaccttcttacatttctagatctaatctgaaccgtcagatatctagatctcattgtctgaacacagttagatgaaactgggaatgaatctggacgaaattacgatcttacaccaaccccctcgacgagctcgtatatataaagcttatacgctcctccttcaccttcgtactactactaccaccacatttctttagctcaaccttcattactaatctccttttaaggtatgttcacttttcttcgattcatactttctcaagattcctgcatttctgtagaatttgaaccaagtgtcgatttttgtttgagagaagtgttgatttatagatctggttattgaatctagattccaatttttaattgattcgagtttgttatgtgtgtttatactacttctcattgatcttgtttgatttctctgctctgtattaggtttctttcgtgaatcagatcggaa

SEQ ID NO: 329 - DNA, 2016 bp, Arabidopsis thaliana
  misc_feature (1)..(2016): Ceres Promoter p32449
gatcggccttcttcaggtcttctctgtagctctgttacttctatcacagttatcgggtatttgagaaaaaagagttagctaaaatgaatttctccatataatcatggtttactacaggtttacttgattcgcgttagctttatctgcatccaaagttttttccatgatgttatgtcatatgtgataccgttactatgtttataactttatacagtctggttcactggagtttctgtgattatgttgagtacatactcattcatcctttggtaactctcaagtttaggttgtttgaattgcctctgttgtgatacttattgtctattgcatcaatcttctaatgcaccaccctagactatttgaacaaagagctgtttcattcttaaacctctgtgtctccttgctaaatggtcatgctttaatgtcttcacctgtctttctcttctatagatatgtagtcttgctagatagttagttctacagctctcttttgtagtcttgttagagagttagttgagatattacctcttaaaagtatccttgaacgctttccggttatgaccaatttgttgtagctccttgtaagtagaacttactgggaccagcgagacagtttatgtgaatgttcatgcttaagtgtcgaacgtatctatctctactatagctctgtagtcttgttagacagttagttttatatctccatttttttgtagtcttgctagttgagatattacctcttctcttcaaagtatccttgaacgctcaccggttatgaaatctctacactatagctctgtagtcttgctagatagttagttctttagctctctttttgtagcctagttctttagctctccttttgtagccttgctacagagtaagatgggatattacctccttgaacgctctccggttatgaccaatttgttgtagctccttgtaagtagaacttaggatagagtgagtcaactttaagaaagaacctagtatgtggcataaccagattgcaggctctgtctcggctacagtaacgtaactctatagctctttgttttgttcagaaagaaccagtgattggatgattcgtccttagaaactggacctaacaacagtcattggctttgaaatcaagccacaacaatgcctatatgaaccgtccatttcatttatccgtttcaaaccagcccattacatttcgtcccattgataaccaaaagcggttcaatcagattatgttttaattttaccaaattctttatgaagtttaaattatactcacattaaaaggattattggataatgtaaaaattctgaacaattactgattttggaaaattaacaaatattctttgaaatagaagaaaaagcctttttccttttgacaacaacatataaaatcatactcccattaaaaagattttaatgtaaaattctgaatataagatattttttacaacaacaaccaaaaatatttatttttttccttttttacagcaacaagaaggaaaaacttttttttttgtcaagaaaaggggagattatgtaaacagataaaacagggaaaataactaaccgaactctcttaattaacatcttcaaataaggaaaattatgatccgcatatttaggaagatcaatgcattaaaacaacttgcacgtggaaagagagactatacgctccacacaagttgcactaatggtacctctcacaaaccaatcaaaatactgaataatgccaacgtgtacaaattagggttttacctcacaaccatcgaacattctcgaaacattttaaacagcctggcgccatagatctaaactctcatcgaccaatttttgaccgtccgatggaaactctagcctcaacccaaaactctatataaagaaatcttttccttcgttattgcttaccaaatacaaaccctagccgccttattcgtcttcttcgttctctagttttttcctcagtctctgttcttagatcccttgtagtttccaaatcttccgataaggcct

SEQ ID NO: 330 - DNA, 857 bp, Arabidopsis thaliana
  misc_feature (1)..(857): Ceres Promoter PD1367
  misc_feature (116)..(116): n is a, c, t, g, unknown, or other
  misc_feature (136)..(136): n is a, c, t, g, unknown, or other
  misc_feature (154)..(154): n is a, c, t, g, unknown, or other
  misc_feature (159)..(159): n is a, c, t, g, unknown, or other
  misc_feature (168)..(168): n is a, c, t, g, unknown, or other
  misc_feature (172)..(172): n is a, c, t, g, unknown, or other
  misc_feature (175)..(175): n is a, c, t, g, unknown, or other
  misc_feature (679)..(679): n is a, c, t, g, unknown, or other
  misc_feature (680)..(680): n is a, c, t, g, unknown, or other
  misc_feature (686)..(686): n is a, c, t, g, unknown, or other
  misc_feature (724)..(724): n is a, c, t, g, unknown, or other
  misc_feature (737)..(737): n is a, c, t, g, unknown, or other
ttggaattaattctgcggccatggggctgcaggaattcgatggcccgatcggccacagttttcttttctcatcttacaacaagtttccaggaggatagagacataaacgaagctcnggattgtatcgttctttttnagcttttattcacatccngaaangtcctgtangttntangattctgttatcttgcggttttgagttaatcagaaacagagtaatcaatgtaatgttgcaggctagatctttcatctttggaaatttgtttttttctcatgcaatttctttagcttgaccatgagtgactaaaagatcaatcagtagcaatgatttgatttggctaagagacatttgtccacttggcatcttgatttggatggttacaacttgcaagacccaattggatacttgctatgacaactccaactcaagagtgtcgtgtaactaagaaccttgactaatttgtaatttcaatcccaagtcatgttactatatgtttttttgtttgtattattttctctcctacaattaagctctttgacgtacgtaatctccggaaccaactcctatatccaccatttactccacgttgtctccaattattggacgttgaaacttgacacaacgtaaacgtatctacgtggttgattgtatgtacatatgtacaaacgtacacctttnnctcctnctttcacttcatcacttggcttgtgaattcattaattncctgcgaaggccntgcagggccatcaccactgcagtggaacaatgaagactaatctttttctctttctcatcttttcacttctcctatcattatcctcggccgaattcagtaaaggagaagaacttttcactg

SEQ ID NO: 331 - DNA, 24 bp, Artificial Sequence
  misc_feature (1)..(24): Sense Primer for PsBBE Gene
aaacgtgtttagacatgcattaga

SEQ ID NO: 332 - DNA, 24 bp, Artificial Sequence
  misc_feature (1)..(24): Anti-sense Primer for PsBBE Gene
cctccgaaaccatttagagctata

SEQ ID NO: 333 - DNA, 21 bp, Artificial Sequence
  misc_feature (1)..(21): Sense Primer for PsCR Gene
ttactgcatactcgcctttgg

SEQ ID NO: 334 - DNA, 21 bp, Artificial Sequence
  misc_feature (1)..(21): Anti-sense Primer for PsCR Gene
agattttcctctgacctggga

SEQ ID NO: 335 - DNA, 24 bp, Artificial Sequence
  misc_feature (1)..(24): Sense Primer for PsSAT Gene
ggtaaaatgtgtgagttcatgtcg

SEQ ID NO: 336 - DNA, 21 bp, Artificial Sequence
  misc_feature (1)..(21): Anti-sense Primer for PsSAT Gene
aacgatcaccagtgcttcctt

SEQ ID NO: 337 - DNA, 23 bp, Artificial Sequence
  misc_feature (1)..(23): Sense Primer for PsHMCOMT1 Gene
ttggtgaatacaggtggtagaga

SEQ ID NO: 338 - DNA, 22 bp, Artificial Sequence
  misc_feature (1)..(22): Anti-sense Primer for PsHMCOMT1 Gene
gcgaatcggtctgatcttatga

SEQ ID NO: 339 - DNA, 22 bp, Artificial Sequence
  misc_feature (1)..(22): Sense Primer for PsHMCOMT2 Gene
aaaacaatgatggggcaatcac

SEQ ID NO: 340 - DNA, 24 bp, Artificial Sequence
  misc_feature (1)..(24): Anti-sense Primer for PsHMCOMT2 Gene
ggtgtaccaagtatcttaccattc

SEQ ID NO: 341 - DNA, 24 bp, Artificial Sequence
  misc_feature (1)..(24): Sense Primer for PsROMT Gene
tacaacaataatcaacgagatgct

SEQ ID NO: 342 - DNA, 24 bp, Artificial Sequence
  misc_feature (1)..(24): Anti-sense Primer for PsROMT Gene
taactatttcagcgattatcgacc

SEQ ID NO: 343 - DNA, 24 bp, Artificial Sequence
  misc_feature (1)..(24): Sense Primer for PsNOMT Gene
atggcttgtgatactagattggtt

SEQ ID NO: 344 - DNA, 23 bp, Artificial Sequence
  misc_feature (1)..(23): Anti-sense Primer for PsNOMT Gene
gctttagatatggctttcactgc

SEQ ID NO: 345 - DNA, 24 bp, Artificial Sequence
  misc_feature (1)..(24): Sense Primer for PsYDC Gene
gtttctatgtgctactgtgggtac

SEQ ID NO: 346 - DNA, 18 bp, Artificial Sequence
  misc_feature (1)..(18): Anti-sense Primer for PsYDC Gene
gcctgaactccgggcaaa

SEQ ID NO: 347 - DNA, 19 bp, Artificial Sequence
  misc_feature (1)..(19): Sense Primer for At-531F11 Gene
gccagcacgcaaacttcag

SEQ ID NO: 348 - DNA, 24 bp, Artificial Sequence
  misc_feature (1)..(24): Anti-sense Primer for At-531F11 Gene
gcttgaggtggtgttagaattgtt

SEQ ID NO: 349 - DNA, 22 bp, Artificial Sequence
  misc_feature (1)..(22): Sense Primer for At-531E4 Gene
atctcattcaccgacgcagaag

SEQ ID NO: 350 - DNA, 18 bp, Artificial Sequence
  misc_feature (1)..(18): Anti-sense Primer for At-531E4 Gene
cggcgagtctgggatgct

SEQ ID NO: 351 - DNA, 18 bp, Artificial Sequence
  misc_feature (1)..(18): Sense Primer for At-532G5 Gene
cgagccacggaggaacaa

SEQ ID NO: 352 - DNA, 20 bp, Artificial Sequence
  misc_feature (1)..(20): Anti-sense Primer for At-532G5 Gene
cccctctcgttgatgaggaa

SEQ ID NO: 353 - DNA, 23 bp, Artificial Sequence
  misc_feature (1)..(23): Sense Primer for At-531A3 Gene
attacagaggagtgaggcagaga

SEQ ID NO: 354 - DNA, 24 bp, Artificial Sequence
  misc_feature (1)..(24): Anti-sense Primer for At-531A3 Gene
cgcatcctaaaagcagctatatcg

SEQ ID NO: 355 - DNA, 21 bp, Artificial Sequence
  misc_feature (1)..(21): Sense Primer for At-532E7 Gene
gctgcacagtatggagttctc

SEQ ID NO: 356 - DNA, 22 bp, Artificial Sequence
  misc_feature (1)..(22): Anti-sense Primer for At-532E7 Gene
cccttgatcctgacagctctaa

SEQ ID NO: 357 - DNA, 22 bp, Artificial Sequence
  misc_feature (1)..(22): Sense Primer for At-532A7 Gene
ttctgccaaaagtgttgtgcta

SEQ ID NO: 358 - DNA, 24 bp, Artificial Sequence
  misc_feature (1)..(24): Anti-sense Primer for At-532A7 Gene
tgttgagtcttccagttgttgtaa

SEQ ID NO: 359 - DNA, 22 bp, Artificial Sequence
  misc_feature (1)..(22): Sense Primer for At-531H6 Gene
aagaagctaatccactggcatg

SEQ ID NO: 360 - DNA, 24 bp, Artificial Sequence
  misc_feature (1)..(24): Anti-sense Primer for At-531H6 Gene
cgatggttggtaatgtgaattgtt

SEQ ID NO: 361 - DNA, 21 bp, Artificial Sequence
  misc_feature (1)..(21): Sense Primer for At-Zap Gene
caaacaaagatcacgcagcca

SEQ ID NO: 362 - DNA, 22 bp, Artificial Sequence
  misc_feature (1)..(22): Anti-sense Primer for At-Zap Gene
tgccttctcttgacaaacagtg

SEQ ID NO: 363 - DNA, 24 bp, Artificial Sequence
  misc_feature (1)..(24): Sense Primer for PsCAB Gene
aagaatggtagacttgctatgttg

SEQ ID NO: 364 - DNA, 20 bp, Artificial Sequence
  misc_feature (1)..(20): Anti-sense Primer for PsCAB Gene
atgttgcagtgaccaggatc

SEQ ID NO: 365 - DNA, 999 bp, Arabidopsis thaliana
  misc_feature (1)..(999): Ceres Promoter YP0087
tgaattgagtaaaatgtgttttcaaacagttaggtggtagaaggtaaaggtaataacatcatgatcttactaaaagaattgttgcatactaactatcaatattctcaacaacataatataatgtttttttaggtaattttccattttaattttttgtgattaaacaattaaacaactcgaatgatgatgataaaaaaaaaaaattaacaactcgaataagttaaagtagcaatacacatgtcgttcaattcaaccaataaagtaagacttatatttttaagaagttgactaatagcttaataagttggaaaacttgtgtagtttcttaattcccacgtgcagtaagaaataaaaatgaaaaaaattattatatccttcccactctgcgacttttcttttattttatcaaatattaaaaagattcatatcacagtttacacattgaaatcataaacgataattatgtattttgtaataaaaagttagttctgaagctcatactttggatagtcgctagtcgctaatatgctccttgtaataattaaagtcactacgacgcacgtcaaagccgatatttagggcttaattgatgcgtgtttttcttttcatataatagtaatataaattagtactaataaagtatgatggatggttgagacagaaaagaaaaaagatgactgtatggtcatcattacaaagaagaatgtattcttcatgttcttaagaataataaaatgtcacttgtaaatcaagttggtaagcattttgagaactttgttcgatgcaacgtatgatgatttatgtagacaaaagataaaaccgtatcttcaactattgccaagaaaagataaaacctaatctagtcagtctctcaacataaatacaacccaatagccaaactgtgtccaattcggagagaaactaaactaaaacaaaacacaaaagcccaacataagcccaataaaacccattttataaacagaacattactaacactca

SEQ ID NO: 366 - DNA, 1000 bp, Arabidopsis thaliana
  misc_feature (1)..(1000): Ceres Promoter YP0093
atgatgaacattctacatatataattattatgtttaagcacttagacagcataaattctttctaattatataaatctaaccttgttacattgtacatctataaattacttgaagaaataacgagttctatttctttttaaaaattaaaaatactataccatatctcagtgattaagttgaaccaaaaggtacggaggagaaacaagcatttgattcttccttattttattttattcatctctcactaatgatggtggagaaaaaaagaaaatacctaacaaacaaatatatattgtcatacaaaaatatttctatatttttagttaattagtttatattcctcacttttcagggcttatataagaaagtgagcaaacacaaatcaaaatgcagcagcaaatactatcatcacccatctccttagttctattttataattcctcttctttttgttcatagctttgtaattatagtcttatttctctttaaggctcaataagaggaggtactattactacacttctctctacttttacttgtattttagcattaaaatcctaaaatccgttttaaattcaaaaataaacttagagatgtttaatctcgattcggtttttcggctttaggagaataattatatgaaattagtatggatatctttactagtttccattcaaatgattctgatttcaatctaatactctcactctttaattaaactatatgtagtgtaatttcacactgttaaatttctaccatgtcatgtatattagagttgcatagaaaattgtaaaacatccatttgaattcgaatgaaacaaaatgttttaaaataaaattttggtttttaaaagaaaaatctaaaactgaattatatcgtttaaccaagttgtaaaagtcataaaacgtagtatcttgtaaatcgctcttccacggtccaaatagacttctagtaataaacaagtaaaactaattttggtttcttactaattttcacaga

SEQ ID NO: 367 - DNA, 999 bp, Arabidopsis thaliana
  misc_feature (1)..(999): Ceres Promoter YP0108
ttagctgaaccaggaaattgatctcttataccagtttccgggtttagattggtttgatggcgatttgattaaacccccgaaattttatgtcgtagttgtgcatagtattattattctttgcggacaatagacgtatcgggaccaagttctgtagcaaaattgtataagcttaagtttgatgaaatttaaaggtaatcactaaaacccaaatgggacaataaaccggtgaagatttagagtttttaattttgactcatgaatctggagaaagagccctcgttaaaaggagtgaatcaatccataggggaaaaagttttgtctttttaaaaactaaagaaccaaaccttaatagaagcagctcaatgtgtgacaactttccactggcactaagataaagtgactagcgatgagtgcaattattgaaatagtagatggtaaatattacatacaagagtaaaaatatctttatgtcaatgcttaattcagtgtttctggttaacaagagaaacttctctaactttcgtaattgggtcttataaaattttatgcaattatgattttacccttttactacttttcattagctttcacgaatctattttgacaagagaaatcattagaggtaaacatgctttttggtcaagggccttaacagttccaccaatcaagctcaaaagttgtacttaaccgacatcttctgtgaaaacatataattacatgtacaaatcaaaactaccttatgaaataaatagaaatattgcagttcatttctaatttaacctcttcaacttttaaaactatttacatttctttatgtcatttctagtcattttgatgcaaattgtaccatttatggattatcttcacaaatttttaagttggtgaaaactttttggtgggtagttaaaacttgaaatagaaatttactttaccaaaataaactaatgaaaagtaatcactccactccctataataagatttccaacgttcccactaagc

SEQ ID NO: 368 - DNA, 999 bp, Arabidopsis thaliana
  misc_feature (1)..(999): Ceres Promoter YP0022
tagttccattacaatttccaaatgatttgttacaaagctacaagattattcgaaataggatttcatccataagagagaatggtgtggtcgacgctacaatgttgatttattggttgtggtttgcatcttggggatgtcaaatcctaagtttcaagttcttgtaaaaacgttttcaggtttctttaatatattttaatattaatgtaaaaagaaaagatatagcttttgtacaaaaaaatttgtttaatcactatgtaggaggatgcgatcaaattcatggaatgatgtattattagcttttctatcctcactctaaaaacaatactatagtgagttaaataatttgatcatttcaatgtagattaaaattttattaaaagaagaaaaatttaaaagcctataacaaaataaaaaaggaggctcgaggtatgatgggtgtagcagaagagctggcaacagctatcgactgagtgattacgaactcagtactcagtgttctcagctcacacactctttttttgttctctttcttttggacagctttcattttctcttttcttttttctattttgtttcaaaattccatccatattaaaataggcctgatcatgagaataaaggaaatactaatgatgagtttctcaataatgcaataagatgcaattattatgagctatttactattgaaaatgagcaaataaatgtcaaaacacaatctggttaagttagagcaactccattgtataggattcatgtagtttctaagaaaacaaaatgtattaatattttacttttacatccaaaaaaccaacttatatgagtaatagaaacgatcctaatattaggaattttagagattttctctcatctgtttcttaacttttcaatatttttattttttaaaattgtatgagtttctactaagaaactactgctggagttggtcttagcttcccaatgcttctccacctatatatatgcatatctccttcttaaaac

SEQ ID NO: 369 - DNA, 999 bp, Arabidopsis thaliana
  misc_feature (1)..(999): Ceres Promoter YP0080
aagcggcaatttagtaagaagtactcaaagtatcatttaccaaaagtatatggttttgggaagagttgttagggatgtattctttctaaacagatgatatgacgatgttcttgaaaactaatgttaaagacggaatctctggcatcttcactcgggagatatattaaaccgttgattgtagttagccatgtacttagcttagtgcacaaataatctgctgcaagaaatctttttctattataatatctctcatttaaacattagaacatattgtttaacttgttcttctagaaataaaactgctaatttcttatggtaaactattttcctttagattgcacaatcgaactcgaaaatctagtggagactatgtgactatgtttatatatatgaaacctaaatcaaattatcccaataattgggagacacaaaagaaaaattacgaaagaaaacaggaaatcaaatcaaaagataaagagaaggtaaaaaaaggcaagaagcactaatgtttaatatttatagttttctccattaaagaaaaagcgatgatgtgtgttctcatcttttgtgaaagtatatatattgcttttgcttttctcaaaagcaaaagactcatccaacaagaacaaaaaaaaaaactaaagctcaatccaaaagacgaagaatgcattggatactacaacttctttttcacttttctttcaaatttacaattatgattttcacaatacagtttattcaaaaataaataaaaaaacgaggcatgaaaataatgattatcctcttcacttattaagccactcactataagcagagcaactccagaacatagtgagcccccaaaacattaaagcatgatgatgtctaatgatgatgatcttcttcgttccatttctctaaatttttgggatttctgcgaagacccttcttctctttctcttctctgaacttcaagattcgtgtcggacaaatttttgtttttatttttctgatgttaca

SEQ ID NO: 370 - DNA, 1000 bp, Arabidopsis thaliana
  misc_feature (1)..(1000): Ceres Promoter PT0565
caccaaatatagtgttatttcaatactaaaatggtgttatggttggagatgccctaaagataaacatgacgagacacgagatttattaatttcttgatcaaccataacttaataacttaatattaatttcacttaataatttccaattaagtgaatctttacttcaccaaaagttcctaacgaactcttattttctagcatcaatattaccatgaactagcatcaatactatcatgaaaaattcctacttcctatccaactcttaataacaatgctagtcttaacaatattcatcaaaaacttgatatagaccttctaacttagccacgactagtatcggtgaataccaaaattaatgtattcatgagaacttgagatttctctaatgtattcttgttactaaacaagtaacaacactcaagaaatatcatgatcaaatattttactcataaactccatatttcacattttgaaaattttaaacagcaaatcacattgaattttcgtggtaaaagtatttaaaattgaaaaatagcagctcctgatttcaatgtataaatttatctttatatggtttatgtctccaacttattttaaaaaagagagaaagagcacccaaaaggtgaccgtttgaaattcgaatttatttccgtttgaaattcgaattcaaaaaaagtaaaccgaaccgagtctcgttactgactgtcacacattgtttccctaaaagctaattaacccatacgtggcgtaatataacaggtcagtgatcaatactaaataacagacatacacctttaaaattcgtgcacgctccaaaacaaaatctacacttcaaaatcaacggtcacgatcattcctcaaatttcaaaaaattatttaacctcacttccttcgctttgtttttaaaacctctctctctttctctttctctttcgccattaaaactctgtttcctttttcagagattctcagagaagattcattttaccctaagaaaaaa

SEQ ID NO: 371 - DNA, 999 bp, Arabidopsis thaliana
  misc_feature (1)..(999): Ceres Promoter YP0015
ttgagccttattgttgttattgacttttagccaatagaaagagatggaaattcaataattatccacaaaattccaaatcattggtgtacaaaaagatctaaggctgttatattttcaaaaaagaaagaaaagaaatgcaacaaatatggattaaactgtggtttgtaaattgagctttgcatgaaaactttatcactatgatttcactactccatatttattgactaaagtggcactaatgaatttcttaatcatgaaatcttgtatcaaaaagtactaaaataaacatgacattggcaattaggaaaattctaaattagaaattagtaaaaatgaaaggtgaaagggaaagatgatgatatgaattggttggtgaccaggagaaatgtatcccgatttttgcagacactttcagtgtccccattcatataattatggcccacctcgttaagatttttcattcaccaccataacaagatctaagcttagatttcatgtaattaaacatataatatacttgccaatactatctaataaagtatacttaagcaaaaattattactctagtgtaaggcgatgaaatataagtttagttgaaaatttatgtcgatataacaaagtataatgaattaagaccttggttttcgattaacaaactaattaaacactagttttgcctaataaaaccgggaatcgtattcaaaaccgaacgacaaaacaagggacaagttgagagacaaaaccaaatcagcatctttcttccagaaatgtcatgaccacatgacgtcatcttgacccttcttcattgtgatatctgtggataaagcgcacgtgtttaattcacgaaccttcgtagtaacgaaaaatccacaactttcatattttttaattacccactaaactaaaacaaatttggaaaaacatgaaaaactttttctttttttccaggttcgtgaacctcgtaccctctatataaacctcttaaccaccttccacata
